United States Patent Application Publication US 2026/0258423 A1 - sequence listing, part 41

SEQ ID NO: 301568 - DNA, 83257441 bp, Homo sapiens (residues 4,269,615-6,404,421 of 83,257,441)
  source 1..83257441: mol_type = genomic DNA
ataacctcacaaacatgttaccttagtatgacacgtcaacctcatatggattttaaactcaaaaaagaggccagaaagccactcagatcatctatcccatacaagcacagactgaaatctatatgcctctacgagaacttggaataaatttaggaaacagccaacagttctacaatccataagatctatggagatgttgttgatggttggcacaagtttagggggaaaaatcattttcctaaagcagagaggaatcgcctcacactgatgaggcactggtgggacaaaagccacctcgttcagtgtcacctgaatgtgggtttcgtatcaaatgtagaggcatttaaatttacattatcagatgaacactgagaaaggcacagatgacatctccgacagaggaagggaagttgtaacatctatgtaggcctgtttcagtatgtaacacactcagggcaggtggaaaagcatgtggagacgcactcatgcctggctctcacttccactcccgtagagctagccctaaaaaaaaaacccacatggttttatcaaactaactgcattaaagtggcacttaaagttcaaaaatagttgtccctgagttactaggtcatttgctgcttgctgaagagtcagatcccaagtttcacctcaacagattgctagcagaattatagcaataggagagcaaaatttgaactccgttttgccacaagcaaccaccatgtgaacaagttctgattttaaaagggagggatcccatctcttaaaagaatttttttgtattagccaggcatggtggcatacacctgtagtcctagctactcaggaggctgaggcaggaggatcacttgagcccaggaggtcaaagctgcagttagctatgatcgttgccactgcactccagcctgggtgacagagagacccagtttcttaaaaaaaaaaaaaaaaaagtaaaaaggattgtattccaagtccctggagggtgtgcagtgctgacattttggggcaactatttttacagtctttggaaaaggaaaaaaaaaaccaagtcacaaagttcttaaagaaaactgggttctaatgaatcaatttccagtcacaacacacttacgagtttctataaggtttgtgggtttgtataatgtttacaggtttttataacgcttcagagtagaggacagggacttagaaaaaaatcactctctactgtgactacatcctcaaccattttatttctgcttaaaaaaggacatacaacgtttgtagaggtctgggctcttggcaggagttctttcactcttctgccaaagcatttctccaaaccccacagagcagagatgcacgaattctcactgattctcacaatcaaacaccatgtcccatctgctactgtctcaagttctatcccttataagccaaagactacttcccacacacaacctcacaacaaacatgaaggagcctaaggcctgcctttaacactgcacatgttcattttaccatttgctgaagttgttttagaaaactgtatgatatgaaatatattgaagctcaaacattaatcacatccaagtgtactattgttagtgacgggatctatacgtcaaatagcaaagcatttacccctgtaatgcttttagattcacagaagaatctagatagaaccaaatacatatactgccatggccatgtgattttcaagtattaaaagttcatttgcataaggaatcaacctgagattttcctaaaccacttctctggcactcagtattatagccttcattcaatacaataaaagccaacaacttgacaattattgaaaaaaaattatattttggaagaactcactacataaggtgacagaattccaaaatcaaattacatgaaaatatacatcgcaatttctttgtacaataggtgagaaaaatctgcagtatagaagaatagaggcagagaaatatgaaggactaaggagaagggtatgagagtaaataggatttgtaatagcaaacccagaagttaagtagaaagcctgtagctgtgcatgcttcatttatccaaccttaataccaggcaactgaagagggaaaagtcagatttgctattgtttggggaaattttcagtaagttgaattaagaaccatctatttttagttctcaggggtaatgactgggatcaagagctcacaacggccaataaatgttattgctatatccaatccaagaggtgggtgcaactagaatacaaaaaggacaaagcacctagtgatgactccttcgaagtcatcattaaaaatcaagtaattgctcattaagtatttcagtatttgaactaaatcatttgagaacattctggcaggtaagagataaaagcaaaggggagtgtgtcaaaacaaagaagatacaaaagtttagtaagtgaaaagagtttaatgaagcctcaagggtttaagggaaattaaatggaaacttttaatcctaattgcttttcatctgacatgcttaaaggaatccttttaaactgataagaaacaatgaataggaaagaaaacctgctaaaatctcttagaatttacacgattcttattctactacaagaaagcattatttggtacaaggtgtatttgtggatgtacatgaacagtatatatattatccggatcatgttgtgctatgtacaggtctttacaattcttcctgaaggttaaaacagttcattagaattcaaaatgcgtaatcatctgtaagttggcacttgttaggctcttgtcagcattgataactggcatgttttattgcagcccagttccagccagtgtttgccaacttgtacaacagaagtccagcaataggtgggtagagtgcaggaaaaacagtgccatgtttctcaattggagacctacaacaacaaaaacaacattatatagtcaattcatcaattacaaaagaattaactgtaagtaggttttatccatattagatttatttgacaacaaatccttaatttcattctgagctcactttgtttctatctattatggtagctcacagccacgtgggtatatttaattttaaatgtaaattaattgccattaagtacaatttacaatttagttcctgagtcatgctaagcacatttcacgtgctcagtagtcacatgtggctagtgactggcaagctgaacagcacagctgtatccttatcatcacagaacgttctactggacagcgctaatttagatttttcaatacttcaaatgtctttcaacttatattaaatctagaatccataagagaagatttaaaagccaagtgatttggaaatttacaaacatttgaggatgttcagagaaacaacttaagattgccacacttcccaacttgctaaattctatctaactcactatagctcccttcaaacccattttctccacaaagcctgccacaaatgaccctccatcccaaccacagtttctaagtgtttcaaatctgttggcctcgtatcatccagttagactgtaagtcaagaacacatctacataaaaagcagcaccgcctcatcgagttctgatgtgccaagcagcatgctaagcgctttacaaactcatttcctgaatgctcacaatcatcattatgaaggagtctcccctctaaagctgagacaagttcacatagccaataaatggctgagtttcctgttcaaaaagttagaaaaacactaggttgaagtttttgtttgttatttatttgagacagggtcccactctgtccctcatgctggagtgtagtggcatgaacatggctcactgcagcctctgggctcaagtgatcttcacacctcagcctcccaagcagctgggaccacaggcacacaccaccatgcccagataatttttaatttttttttgtagaaacagggtcctcaccacgtcacccaggctggtcttgaactacaggctcaagcaacgctgccacctcggcctcccaaagtgttgggattacaggcatgtgctactgcacccagtggttaaagctttaaaagtctcatttgactattagacttttcagagtctttattatattaatatgtgctttgaaaggggggtgggtgggggcgccaaggacagcagaaaaggaaacacctattaggactgcatctttaggtcaagtgttccaaagaactcagaaactctgaatccattgccatgcacaattttgggcaaaagaaacagaagatgactaagaaatcaagggatataattttaaattcctcacagagaagccaaatatacctaaagagttatgacaaattttaactcacaccagacatgttcaaaattcagcatgccttctaaagcccaatatgaacttaccaatttttttttttgagacggagtcttgctctgtcacccaggctgcagtggcgcgatctcggctcactgcaagctccgcctccctggttcacgccattctcctgcctcagcctcccgagtagctggatctacaggcacccgccaccacacccggctaatttattgtatttttagtacagatggggtttc[269 bp omitted]cggcctcccaaagtgctgggattagaggcgtgagccaccacgcctggccaaattgatctatcttacaatcactcaaatgcaaccataccaaaagctctgttgtggggagaaagaaagccatttagacaacctccctacaagatcctgagaggtagaacgactgctatatgtctttccaaaagacatgtaccaatcaatgtaaatggcccttagcaaagcatgaaatgtactaagtaacaaatatatcaccttcaccagatacacgtatgcacatacatatttttattagaaaatcaaaagacatacactgaaacccaagagatggccaggcacagtggctcctgcctgtagtcccagcactttgggaggccaaggtgggaagattgttagacaccaggagttcgagaccagcctgggcaacaggagacccttgtctgtacaataaataatataattagccagccacggtggcacatgcctgtgggaggacaacttgaagctaggagttcaaggctgcagtgagacatgagtgtaccactgcactgaagcctgagtgacagtaagagtgagaccttgtctcaaaaaaggaacagaacagggcaggggaggacgccactgcactccagcctaggcaacagagcaagactcccgtcttaaaaaaaaacaacactaaaatcaggcgacctagccttttaatagcaaagatccagttttaaacagcattacccttttcagcagaggaaaaagaaaatctatccctcttcccttttaataaaagttatactaaattctaaatagagacaaggcctcagtacagaaaaggcaggttttgtcattcttttctccagaaagataaatgtgaaactgaattaaccagcacaacactgcaaataaatggtgctgacttgcaacagtcatttacattttaagcatatccatttcgcagaatttatgtttcaatattaattgaaattatatcaattgcacctgtcatttgcctcatatcttctcagaattatgcctgctttttaacctaaaaatctggagatggtttacctccaaagaacttgagtgtcttattccatttattaatatttctaaaactagagtcgtctttaattttccatatggctacaaaacctaatcttttaaaaagatctaaaaaaatataaaacagaccaatgtgctcccaaatagaagccactttttgatgttaatgacaaaaataaaagtaattcttcaatcatagggaagtatttcaatgatcttaagtgtttcaatgatcttgtaagtgaaaacagccaataccaattaagttttccccattacccttcacaaaaaaatgcttccaaaagttccaaatcaccctacacagccacccagtgtactcctgctccgtcaccaatccgctgactttttcccccacactgggaccgtgctgctcgtcgtcttctaccatgagattggtgagtagctctaacaccaacttcctttctgagctctctgtgagaactcactctcctaactctcctgcatgttaccaagccagtctctgtctcttccttctgtaccctaattgtgcagtctccaagttgtccttgccctggtaagtactgctctctacaccaaacagatcttcatctctactctggagacttgcaatgtcaccagcagccctacttctaacctctatcctaaccacctcaaattgagtcatggtctgcttctactcccactgaagcccccccgcccttttttttggagacagagttaccctctgtcgcccaggctggagtgcagtggtgcaatctccgcctcccaggttgaagtgattctcctgcctcagcctcccgagtagctgggattacagtcgcacaccaccgtactggctaatttttttttttgtatttttag[136 bp omitted]ttatgcttggtctacctggctaggcaaacagtctttacaggtcagtatagtgtatctatcgcattctatgtgttccttctttccccaagaggacagtgcctttgcaaatgtgttagaaataactatagattcatgccccacatctgcaactaagtaaggcaggcaggcagccttctaccttactgtgctgagttacgcaatccgtagtacttattctgggtcaagttccctaggaaacggattctgaggcagagatttgaggtttgtcaggaggtgctctcaaaaacaagagtgagggatgcaagcttagacaaagggagaagatgaactaactcaaggcagttgaaacaaaggcctcagtcaatactatgttagaatgaccttcccgagaattcccaaacaagacaaaagagccagttgaccaagcctttgtaccaacccaactccacccgtctaatccactagtcactgaatgcaggtaagcaccagcgattcctacaggggaactcagctgtgctttacagcagacaaggttcccgaagcttgggaatgactgcctccctcaaggcagtctacccacacctggctcaccctctctcacttgctgcctctgatgaagccaactgccatgttgtgaattgacttatggagaggtcttcagtagacagaactgagggagaactccagccaacaggcagtgaggaggaactcagtcgtgcctggaaccagatgcaccccagttgagtcaacaccttgaccacagccttatgagagacccggagtcaaccaagccacacccagatcccatggccatggaaatcatgagataataaatgttgtttcaagccactaagttttagtaatttgttacgtagcaataaagaaccaatacagtccctctagccttggtgcagaacggagtcctcctgtccagtggtacacaaagtagccatggttctcatctgtggcaaggggagaatttgtttccttttcctctctattcttcctaccccacagctgaattagaacataagggtactaataatctctatataggacaaggtataaacactaacaaaatgtgagataaagcctgggccaagtggcacccacagtaatccgtgcattttgagaaaatatgtgtgggtcatggacttgaatgtagataaatatgtattttcaaataatcttaaattgatttcactttcagttcagcccagacagacaatacatttttcaagtgtttatagtgagttttcgttcacgtctatgtcctatcacatgactgaaaacacaaaaaatactcagaaagtgcatggtgataaagccgtgagaaaagccagccttcaagaagagacaggtgaggctgctgactattcagtctacaaagccggccttggggaaacaggtatcttttacatttttttttttttgtttgagatggagtctcactctcttggctcactgcctctgcctcctgcagcctctgcctccgggattcaagtgattctcctgcgtcagcctcccaagtagctggaattacaggcgcctaccactacgcccagctactttttgtatttttagtggagacggggtttcaccatgttggccaggctggtcttgaactcctgacctcaagtgatccacccatcttggcctcccaaagtgctgggcttacatgcatgcgccaccgcgcccggcctaaggaaacaggtttccatggtataaagccttaatacaaaaaaattgtgtaatggcaatgacatttaaaaattaggtgcacatctcaataaaaagaagactgactcatttatttaagcatttgattgtctacagcaggggtgcccagtcttttggcttctctgaaccacactggaagacaaattgtcttgggccacacaaaatacactaacactaaccacagctgatgaacttaaaaaagaaaaaataaaaaaaaatcttgatgttttacgaaattctaccaatttgtgttgggctgcattcaaagctgtcctgggatacatgtggcccgcaggctgcaggctggacaagctagcatactatactctgaatatcagacagatgagtgaaatatagacccattgttagaacacattagtgattttggtgtgatgtatatttaattcaatttttaaatgattacacttttagttcaactaatgattggtttaggtacttactgaggcatttacttcctaagcagatttttaaaagatggtgaaaataggaataatttttagactgcatggtatatctggtagtaaaggggagcacttctggttataataaggagatctgaaagcacatctaaattttttctagaaaccagagatatcaaacatgaaaacaggataaatggtggacagactttagctttacttcggacttaaacctttgcatttgatacatttaatcacaaaaataaattaaaattaagataaacaagccaaccattgaaaaatacaaaagcccatggccagccacagtggctcatgcctgtcatcccagcactgtgagaggccaaggcaggtggatcacttgaggtcaggagttcgaggccagcctgaccaacatggtgaaatcccatctctactaaaaaatacaaaataagccaggagtggtggcacacacctgtaatcccagctacttgggaggctgaggcaggataattgcttgaacctgggaggcggaggttgcagtgagctgagatcacgccattgcactccagcctgggcaatgagagtgaaactccatctcaaaaaaaaaaaaaaaaatgcccaaaacagatcaacacgtactggctgatgtgttggaaatctgattgtagaacataacaggcactgtgtaccagtggtgaaagcaaggacttgtcaataaatggtacagtcaacagttacacatcaggggaaagtggggtgagtgaagttcaacctctacctcataccatacacaaaaatcaatttcaatggattcaacacaaatatgaaaagcgaaacaaaacagatttttggtggttaaaaaagaacaggctctctagccaagaaacgaaaagtaaaatccataaaggaaaagactaatcaattcacctgcattaaaattaagaacctcaggccaggtgcggtggctcatgcccgtaatcccagcactctgggacgctgaggcactagaactgcttgaacccaggagacggagattgcagtgagccgagattgcaccactgcaatccagcccgagcgacacagcgaaactctgcccccaaaaaaaagttatatatatatatatatatatatatatatatatatatatatatatatgaacctcagtttgtccaaaggataccacaaagaaaataaaaggacaagtacacaaatcaacaaactgaaaaagtaatctaaaaacctgaacacgcaattcacagagaaaacctcaatggtcaaacacatgaaacgatatgcaatttcactggtaactagggcaattcatattaagtccacaatatccagatttagatagatagacttttttttttttttttgagatgaagtctcactctgtagcccaggctagagtgcagtggcgtgatctcggctcatcgcagcctccgcctcctgggttcaagtgattctcctgcctcagcttccagagtagctaggattacaggtgtgcaccactgcacatggctaattttttgtatatctggtagagacgaggtttcaccatgttggccaggctggtcttgaactcccatcatcaggtaatccacctgcctcagctcccacaagtgctaggattacaagtgtgagccgcggcacctgggcttttttttttttttttttttttttttttgagatggagtctcgctctgttgcccaggctggagtgcaatgatgcaatctcagctcactgcaacctccgcctcctgggttcaagtgattctcccatctcagcctcctgagtagctgggactataggagtgcaccactacaccttggtaatttttatattttttggtagagatggggtttcagccacatggaccaggctggtcttgtaagtgatctgcccatctcaacctcccaaaatgctgggttacaggcatgagccaccatgcccggctgggaatcttttttttttttggaacggagttttgttcttgttgcacaggctggagtgcagtggtgtgatctcggctcaccgcaacctccgcctcccgggttcaagcgattctcctgcctcagcctcctaactgggacaacaggcgcacgccactgtgcctggctaattttttatatttttagta[143 bp omitted]gactatgaaaagaaggaacactttagaaaacaatttggcattatctactcaaaatgaaatacgcgtacccttgatttaagaattccaccccaagtatataccctagagaacctcttacagtacatgcaaatcaggaaacaaggatagccaccctctataacagaaaaagaacaaacacccctacaccaattcagaaaataactgcaatgagaataaggagtagagcggtaatttacccagtgtaatagcacacaggtgaaatgtacctatttgcaacacagatcaatttgaagaatattgagcaataaaagtaacagaagaatgcattcattatcattccacatataaacagttcaaaatcatgaaatacattgtttaaacatgcaaatttggtaaaattatgaagaaaagcaatagtaaacccagagttaggaatatgagaaagggacagaagaaagcagcggagtgtaggggacagaagataatggtaatgttcattttcttaaaataggtagactcaagatgtgccatggattgtgatttttcagacagtgtatttcggtttctccctcaacccccacaaatcaataggtcttttattgagtaatttaaatatcacgaataggtcttacgaatcatctggcatcttgtttctgtagctggacaactcttagactttattcaccaacttgcagaactattccgttttcagagacatagatattcaataacaattttctgctatgtttttaactgttgcagcttgctgaatcaaagcagctgaatttgaaaccagctcaatgttgtatcctttggtgctctacaccttcagaaaacttctatagtaacaaactatagaaatgatccctgaaaggatagtcttcacttcagtttctatcatttcaatatttaattttaaaagaagagaccaaataacccacatgtgagcaattaatctatattatttcctcttctaaggtggatgggtgccttccatctttgactcctttctagacctaacataaaactgtggacagatgttatacaataaaagggaagtttttaactactggccctatctgtaaagaccaaggagatagaagaccaactttttgtttgtttgttttttgtttttttctgagatagagtcttgctctgttgtccaggctgtagtgccacggtgcaatcttggctcactgcaacctccgtctcccaggttcaagcgattctcctccctcaacctcctgagtagctgggattacaggcacacgccaccaggcctggctaatttttgtatttttagtagaggggaggtttcaccatgttgtccaggctagtctcaaacccctgatctcaggtgttccacccgcctcggcttcccaaagtgctgggattacaggcatgagccaccacgcctggccagaagaccaaccttaaaggaataggtagatgactaatagtcttgcctataccctacataatacagtatatgaagatacattagtgcccaagtgatcaggatgctagatcaaaaagtcaaacaaagaaactaaactgaaataacaaccttatcattagaaactttaccatcagtgaaaagaaacagaccagcatactaaccatatgaatgcagaatatctagtcaaaaacagctgggtgtcttaggagaaaagcaagcagattatacagtagttttgagaacgagactacaggataataccattaaaaaatgaagtcaatgaaaaaatgtaattcaaatacccaaatcacacaatttccaaaaactaataggatacttacaaaaaaacaaaagtatgatatttaaaataaacttaccctgaaataagtgaagttactagctgctaaataaatgtcactcaaaagcagtctcttggctttttcttacacagcgggcaacttttcttttaaattctccatttctatcttccctccattctttctgtagattaaaaaagcagtatcaagtgatttcatgcaaactcccctttataatctcaaatatttattttaattttgaatgtaatcccttggtgatttgtacacttcagaaacattatagagttgaaaaggtagaaagcagttagacatactttttcaagacactaccaggatatacaggcagaaatctcctatgcaaattacctctacattaaaaattatctttaaaaaagaaaaaggtcacaaaagaacatttacagttttgtattacactgaaatagaaagctaaaatataccaataagacattcaggccaggggccgtggcgcacgtccataatcccagcaagctgggaggccgaggtgggcggatcacgaggtcgggagtttgagaccagcctgaccaatatggtgagaataaaagtacaaaaattagccaggcgtggtggcacatgcctgtaatcccagctactcaggaggctgaggcaggaaaatcgcttgaactggggaagtggagcttgctgtgacctgagatggtgccactgcactgcagcctggacgacagagcgagactccatctcaaaaaaagacattcagttggtaatctgaaggattaccaactctccctattggaaacaaccagaaaataaacataaaagtgtctgcaacataaggtagataggtgggatgcatcatattgagatgatactaagtaccatttctactgtagaggaaaatatatgacaattatcactgtcactgcctgacatacaaaaatggaacagaacagtggggtaatgaagggaggggagggaaagggaagagcaggagagagaggagttggaggagagaggaaacaaagggaaaagggtctattaaacagaggcctagagaagctaaaatttggaaatggcaaatctgagaagagcctgaataaaaagtggggctgaggccatgcacagtggctcacgcctataatctcagcactttgggaggccgaggcaggacctcaggatcacctgaggtcaggacttcaagaccagcctggccaacatgatgaaaccccatctcaactaaaagatacaaaaattagctggacgtggtggtgcatgcctgtagtcccagctacttgggaagctgaggtgggagaatcgcttgaacctgagaggcagacgttgcagtgaggcaatatcgtgacactgcactccagcctgagcgacagagcgagactccgtctctcaaaaaaaaaaaaaaaagagggcctgaaaatagagattaattgaaagtctgtatactcaacattttccctcacctatatccaaaattttaactttcccaaaataataatatataaactttatataaatatactgaagaatactataattagaaccgctaggctgggtgtggtggctcacatctgtaatctcagcactttgggaggcagaggcaggtggatcacctgaggtcaagagtttaagaccagactggccaacatggtgaaaccccatctctactaaaaatacaaaaaatttagccaggcatggtggcacgtgcctataatccctgttactcaggaggctgaggtgagagaatcacttgaactcgggaggcaaaggttgcagtgagccgagatcatgccactgcattccagcctgggcgacagagcgagaatctgtctcaaaaaaaaaacaaaaaataaataaaagaactgctagtgtgggtattggtgccaaaaacaattactccttcattttggaatttaaaagacacctcttcctccaacccttacccttaccttcagtttagtagctttgtcatccaaatagccatatagctttgagtgacataaataccatttgtttttttccccccgagactgtcatttctttttctttttcttttcttttcttttctttctttttttttttttttttttttttggagatagggtctcactctgttgcctgggctgaagtgcagtggtgatcatagctcactgcaggcttgaacacctgggctcatgcaatcaatcccccacctcagcctccgaagcgtctaggacaacatgtgcacatcaccacacccagctgatttttgtattttttgtagatggggtttt[135 bp omitted]ctggtatctttaaaattaaagcaaattttaatttggcaaatcaaaaagagttcacacaactctgtgaaatttccaaagaccaatcataaagaaaagaacctaagtacaatggggaaaaaaagaaaaggaaaaaagaacaagtcacctaaaaatggaaaagaatcagcctagtaccaattttcacatcagcaataagaaatagtaaaatataaattctatataaatttgattttctccctataatattagaaacaaagtatcaatcaagtataagggaaaaataaaagcaccttacatcataaatagactaaggatttaattgccacataccctaaaacattactctaggatgaaggaagaaatcaaccaagaagaaaaagaagaaatgggatccatgaaacaaaagattcaattgagaagagcagtgaaggggtaatctgagcaaatcaactaagccccaggct[133 bp omitted]aaccccatctctactaaaaatacaaaaaaatagctgggcatggtggcacgcacctgtagttccaactattcaggaggctgaggcaggaggatcgcttgaacttgggaggtggaggttgcagtgagctgagattgcaccactgcactccagcctggcgacagagcgagactacatctttaaaaaaaaaaaaaaattggagccaaagaagaaagggacccaggagagaggtggctaagaaaaatgcgggtttcctggaataggtactgcagactgagaggtcagaaaatcaatactatgaaaatatgatcaaaggtgtaatatgagagaagaaaaagcaagtaagaatagtaaactgggccgggtggctcacacctgtaatcccaacactttgggaagccgaggtgagtggatcacctgaggtcaggagtttgagaccagcctggccaacatggcaaaaccctgtctctactaaaactacaaaaattagccaggcgtggtggcagatgcctgtaatcccagctactcgggaggctgaggcaggagaatcacttgaacccgggaggtggaggttgcagtgagctgagattgtgccactgcaccccagcctgagtaacagagtgagactctgtctcaaaaaaaaaaaaaaaaagaatggtaaactgtttataagtcatggtttttggttttaatatgagacaactaactagttaaatcagaaggaagaaccagtgggattcaagaaaaaaaaggaatagattttgcacaatttgtggtatttggactagaactcatatttgcatatttcaacctcacattaaggcctatttcaacacttaggaaaatgtttagcatcaagagaatgactttactctggcagtacatttggctctttttagattcagctattttgaagggttaataaagtaatttttgcatattcatggtcttggttattggctattaatttactcttctttaagataaaagggccaggtgcagtagctcatgcctgtaatcccagcacctcaggaggccaaggcgggcagatcatttgaggtcaggagtttgagaccagcctggccaacatggtgaaaccccatctctactaaaaacacacaaaaaaattgctgggcgtggttccgcacgtctgtaataccagctacttgggaggctaaggcaggagaatcgattgaacacagagggcagaggttgtggttgcagtgaggtgagatcacgccactgcactccagcctgggcatcagagcaagactctgtctcaaaaataaataaatacatacataaaataaaaagggcaacttgtcagctctgattttttttttttttttttttagatggagtcttgcactgttaccctggctggagtgcagaggcgcaatctgggctcactgcaagcactgcctcccaggttcaaacaattctccgtgcctcagtctcccaagcagctgggattacaggcgcctgccaccacgcctggctaatttttttgtatttttagttaagacggggtttcactttggccaggctggtctcgaactcctgaccttgtgatctgcccacctcggcctcccaaacggctgggattacaggtgtgagccaccacgcctggccaactctgatcttattattaaaattgctgatagttgagcatgaaccatataaacattcatcaggtctctctcaaaatgatttcctaggatttcttttaatgcagctatcaccccttctcccttatcatgtcttacattgtttagactaatacttgattaaatagatagttttctgccagtttttagttcaattctattattaatttcagtcatagctttcaaagggagttatctatagtgtctcagtctgtatataagattccacccaagttgttattaacctaagaaaaaaggtaaattttatgccctggctttggtatatagtactaacaaaggttctaagaataagaaaaaaaggcttttcaaagaaggagagaaggctaaggaactaggaactattctagattaaagccgactaataaaacttgaatacaaataaaacagaggttcctagactagcctctggatttaaaaagaaaaaaaaaactgcaggataggggcgtggcagctataaagaatactggacaatccaatccaatgtgaatatagattatatatgcataaacaataatagtactacattaacgacagacttgtactgtgtatatggaaagacagccttgttcttagggaacagatcctgaaacattttggggtgaagggttatggtatctataaactactctcaaactgtttaggaaaaaaagttgcaaaatttctacaactggtgaacctaggtgaaaggtatgctggtgttcatttaactaatacatttttttctatagatgtgaaacttttgaaaattgaaaacttggggataataatatgaacttcagaccaggcattaaattgtcttaggtatgacaatcgcttttgtttttagagtccagatctcggctcactgcaacctctgcctcccaggttgaagtgattctcctgcctcagcctcccgagtagctgggactataggcgcccgccaccacgcccggctaattttt[155 bp omitted]taactactgtaggactttgctctgtggttaaaatgaggcttacaaaaaaatttcacagttacgacaagccattttaagctgataaaaatctgattgcattgaaaaactacacttctgctctgcccattccacccccaattctaaatttggtgtcacagtttacatcctaataacgacgtatagtattcttgaaaactgctgagaggagaatttaagtgttctcacaataaaattagtaagtatgtgaggtaatgcatatgtgaattagctcaaattagccattccacaacatatccatatttcaaaacaacatgttgtatacaataaatatgcacttttggtcaggcatggtggctcacacatgtaatcggaacaatttgggaagccaaggctggaggaccacttgggcccaggagtttgaggttgcagtgacctatgattgtgccactgcactccagcctaggtgacagagagaccctgtctcaaaaaaaataaaataaatacgtaaataaatatatttattttgtcaaaaataagaactatgggaagagatacacacacacacacacacacacacgcatgcatacattcatgcatacttacatacatactaactatagttcaggttttattacaagggaaagtgaagggaagggaagacgtgtgaccaccttaccgcagcatcaacattagcaggtgagtctccattagggtctgccagcatagaaatgacactaatcatgatggtttccacagtgtggatagggagccagcgttcctctggcttttcataaccatacttatcttccccaggctcatgaagaatagaaatgcacacatcaccatttttatcaactgcaaaattcaagaagaggcttgtttcatatattactaatttggttatacatgaaatatcaattacaaatgtgatcctgattcacacagtacctttatcaaacatgacacatacgcagaagttaatgtccaaaatgcaatgtgttgactttttaagaagactatagtatagattgtactacatacacaggatccatctgacaaacccaataggaatacaagctatctttttcatttatgtaaaacatgaagatatctagcacgtagatggtgcctaacatttacatgtcttaagtataatataataaatgaataaatagcaactattggatgtgttcttcatttgcagaaagcatatttttccaaaaactagcaactgagtttctatgtaatggcctcctagtttccccactaacttaccgacttaaattggtaatagtcaaaggcccagagactattcctaagaaatatatttttacaatcatataaagccaaaattgtattttctgagaaaggagtatattcaaattcacaaaacaaacatgccatactgccaatgaaaactcatcaacatatacgacactcaagaggcctcctttctataaacacatttaataagaaaacatccttatttttaggagacatgtattgacataactatttaagcagtttagcaaaaaagtaaaatattacttattcattaaaaaaaggtcctaatccactaattcatttatacatcatataaataatccctattgtgaaactaatcttttatggtaacatttacccaccgtaaatttttttaaaaatcatactttgaggaagaaattttagaaaggaatttgagtagtgacaatgtttatgtatatttcattcctaacttatcctatatagtctaacaaatttgtgaataaatataatgctaaatcttatttttcgtttcataacatcagtatttctgctgttatgaactctgggtaatcagaatcaaagtttgtatctaccaatcaatatcattgctctcttaattcaacaaattcttattttttggtgttgtctgttgttgctgttttggttttttgagacagggcctcactttgtcacccaggctggagtgtagtggtatgatcacagctctatgcagccttgacctcccaggctcaaacgatcctcctgcctcagccctccaagtagctgggaccatgggcacatggcatgatgcctggctaacctgactttttttttttttttggtagagatgggggtctcactatgttgcccaggctggtctcaaactcctgggctctagtgatcctcccacctcagcctcccaagtagttgggaccataggcacatggcaccattcctggctttttttttttttttttttggtagagatatagtcttactatattgcccaggctggtcccaaactgggattacaggaaacagcccctgcgctggccgacaaatactttttcaatgcctactgcatgccaggcacacatctgacagagaagtacagcagtgaatatatgacaggcaaggcccgtgccttcaatgttttatgtatgaggttttctataattaaggttcctcttcccaacccatccctatctgctagtaaaatctatttactaaaatagaatcagggccagaataacaccgagggccgggcgtggtggctcacgcctgtaatcccaacagtttgggaggccgaggagggcagatcacctgcggtcaggagtttgaggccagcctggccaacatggagaaatcccatctctactaaaaatacaaaattagctggctgttgtggcacatgcctgtaatcccagctacttgggaggctggggcaggagaattgcttgaagccgggaggcagaggttgccatgagccaacatcacaccactgcagtctagcctgggcaacgggcgaaactccatctcaaaaaaaaaaaaaaaaaaggaataacatcaaaacttgtaacactacaaaattcagcataaaaatttcatagagtattactattttacaatgttttctgtacttactgtgtaataaggattttttccaagtcatttttctttaaaaacatgctattaaatatgtgtacagaattctaccaccactatataagatccattttcctttttaaaaaaaatcaagttatcactaatccaggatctttacatttttaaccttctcatgtcattttaaacataccatttattttagaatgagaagatttttaggcttaatacctattatcaaaccatattttaaaggattgtatcaatttatactgccatcagcaatctgagatggccatttcattgcctcctcaggatgaacattttcctttattgatgctgtttaaatttcatatataacatctggtttaattcacttttctaaatgcttttggggtgacaactttccatggatataacctgtatgtccttcctcttttgtgaaatgtctgttcttatcctttagccagttatgtacttaatgtttactttcctcttgccacggtgtttcttagttttccccatataatttttgcttgttacttttttctttcatttcagtgttcattagagatgaaactaagctacctgggccgggcacagtggctcggcccactgtaatgtatggctggcctgtaatcccagcactttgggaggctgaggcgggcggatcacctgaggtcgagaccagcctggccaacatggtgaacccatctctaataaaaatacaagaattagccgggcttggtggcacgcacctgtaatcccagctactcgggaggctgaggcaggtgaattgcttgaacctg[132 bp omitted]acttctagctacctcctttttcttgaggccatgcacctaaaattctgaaaaactgatttaccctcatcttctctatttacttactactcaggtattcctttattctcctagaaactggcttctccctagcaggatgctacaactgtgtccacaagtggtctggatagcatatttattctcctgggtactttcagctacctgaagtcacccctctgggccaagacaactaatactgtgacaacactttgctggatacattttcctcccctggcatctgtggtactcttgttttcccctggttcttgaacattctctcagtcactttctagttttcattttccttaatttgacttttgatgttatcctaatctccaacattaactatattttccgtaggaaaactaacccattcattatcatgttatctatcatcctgatacagtaacttccaaggcccttaagctcattgctgaaccctggactggtttaactaattatctaactgggtgtagcaagtatacctcaagaaaagctgaatatatgtaaggtcagtcacataaaactattcccctataataattttataacatctctataactcacctactatacaattcacctatttgaaaagcacgatttaatggtttctgtctagtatgtctacagagttgtacaatcaataccacaatcaattttagagtattttttcaccctacaatgaaacgcagtaccagttagcaaccattcctcaatcccccccacctcccctccagcagtagggaaccactaacctactttcggtctctatggatttgtctattcttgacatttcatataaagggaatcgtacactatgtcaccttttacgactgactttgttcacttaatataatgtttccaaggttcatctatgttgtagcaagtatcactacttcatttctttcttttctttagaaaacaatatcatgtaattcatttctttttattgccaaataatattccgttatatgggtccacattttgtttttctatttatcagctgatagacatttgggctgtttctactttttggctgttatgaataataaatgctgctgtgaacactcgtgttcgagtttttctggacatgtgtttcagttttcttggttaggttcctaggatggaagtgcagggtcctatggtaactatgcttaaccttttgaggactgccaggctcttctccaaacacccgcaccatttaccttcttgccagtagtgcatgggagttctaatttctctacttcctcattgacatttgttattatctttttgattataggaatcctagtgggtaaaaagtggtatttcattatggttttcactctataattatttttgtaaatggccagtcaatcctaaactcttacttctcctttaccattcacctctggcagtcaagtcaaagaaactaaattacccttcctgcaacactattcttagttcaagtttttattgttttttactcaaattattgctaaaatgctctacctccctgctatctctctgacttccccttccaatcttctatgagtgtaatctttcaagaaggaaaatataagagaaacctattacatagcttttttattttttgtcattttctctttttgtcatgacaatatgtacagctttaaatgtcatgaattaaatgagtcctcacagcctaaagaatgaagttcaagccaagcatcatcttcattcaaaattccatctaagaccaggcgcgtggctcacgcctataatcccagcactttgggaggctgaggcagacagatcacatgaggtcaggagttcaagaccagcctgtccaacatggtgaaaccccgactctactaaaaatacaaaaattagccaggcgtggtagtggacacctgtaatcccagctactcaggaggctgaggcaagagaatcgtttgaacccaggaggcagaggttgcagtgagccaagatagtcccactgcattccagcctgggcgagacagtgagactccgtctcaaaaaaaaaaaaaaaaaaaaaaaaagaaagaaacgaaaagaaaagaaaagaaaaaaaagtctcttcaaccttaaaacaaaacacaccaccattttatcagctgtcctcttaaactacctaggtgattgctctctttctttttaccagaagggaagtctcccatgtatttgcttacatgtatgttttcatctaattttcacagatagaaaacataggcctggcgtggtagctaatgcctgtaatcccagtactttgggaggacaaagtgggcagatcacttgtgcccaggagttcaggacctgcctggccaacaacatggtgaaaccccgtctttacaaaaaaaaacaaaaattagctgggtgtggtggcgtgtccctgtcatcccagctacttgggaggatcacttgagcccaggaggtcaaggctgcagtgagctgtgatcatgccattgcactgcagcctgggtggcagagtgagaccctgtcttagaaaaaaaggacggaatgggagaaacgtacgtgagggagggagggagcgagagagggagagaaggggaaaaggaggggcagagtgggggaaggagagacggagggagggaggaaggcaagctagctagcttaaggctccaacagggtttgcctagagttacacagctagtctgtggtgaagccaacattcagaatctgttacatcttcgaaataggtgcaaaacgattgcctattataatcaagtaatgcaagtgaaggtagaagaaactgtcgaaagcctaggaagagataaaagaaaagccaaagcacaagaggcaagcgtcacccattcatgcatgcccgcatcatgcaggaatacggttaatgcattctgccatcaactgttagagatattttcctcttcttactggtaggaaaaatcactatcttttacgatcactgctgccttagatgcaataaaatacgctaagtcccttggctcccagtagttctccatttgccagttccagtctctcctaatgcccatctggttttcaagccttggcttctattacgtattccatatccttccgataaatccttgtttaacttcattcaatcattcattcctgtctcgctgattccagcttaaactaatctatatgtttctattccctgcacccagaagtcttgatgatgcgaagccaaatgcaaattagtataatagcctaaagagacaactctgattacatagtcaaaataattagaaaagaaatctctgcaagttctatcatacaaaacaaagccaaaagttcagagagactgttttataaatatagcttatctggcctaaactttggggactttattttactttatagagaattttttttttaatttttaaataagacgtagttattgggggcttatatacaggggagagagtccagtggcagctggctaggcaggagaactgccaccgtgtggatttgaagtggtagctcttctttaagtaaaaaaagtcaatgtcatcactacgtgcacagccatactagatgctttccaggcttaaaaaatgtaatacgttgtttcatatgacactgccagtaatcttacacctatgaatacacatagaagagttgtccatggtataaaaataatatgaaaaactataagttacagaaccaggtttcataatttctgtgttctttgtaatagccagtgaatcatctaataccttgataattatcccctcaattataggagttctattgatgttatccctcagtaaccatgccctctggtttaaaacacgagtctcaaaccaaactgaaaactaagtaaataaataaaaaataactttttccacatgatctctgtttctccttctcttttttgggacacggtctcactctgctgcccaggctggagtgcagtggtgtgatcttggctcactgcaacctgcacctcccgggttcaagcgattcttgtgcctcagcctccgaagtagctgggattacaggtgtgtgccaccatgcctaactaatttttgtattttgagtagagatggggtttcaccatgtttgccaggctggtctccaactcttgacctcaagtgatccgcctgcctggcctgctgggattacaggtgtgagccactgcacctggcctctcctccttttaaaggttttagtacacagccatgtgcacaatgaacagtacaaaaatgccaaagcaatttcactgagaaacagatctttcttattgaccttgaacacttcaataacaggccatcaaatctgcaaatgtaaaagtaaaactagataaacttaccatttgggtgccagatttctgtaatgaatttcattttaggaggtcggaggggataatcttttgggaaagtaagatgagccttaaaaacaccaccttcactggaaaaaagaacaaaaagaagttcttgcctataagttcctgcttttaagtatagaagtgttaaaacaaatataaaacaagggtgctagcactaacatcaaaaatgaagtaaacaaataatctggattcccacaggcagttactttctcaaataagtagtttaataaactgtcatggctatcacattgattaaactttcaagagagctggtaaaatgaaatcatctgctaaaaagacattcacaccagatcagatcagatcatattactgctatgctacaaacccttccatcacttcccagtgcacttaaaacaaaattcagaaggtttaacatcaccaatttctctatgttgatttgaaactagccagtcgtctttctattcctcaaacacatcaaaccctttctcatctcaaaacttatggacattttctttttccttatctaggaatagatatattgcctccatctatccatttattcatttcatcatttaacaagtatttactcggcatttatgtgtcaaactccaggggtatagcagcaaaaaaaatctcaagagtgactttccagaacagcactgtaaaaccaaactgtaatgctggagatgttctgtatttgtgctgtccaataatgtagccaccaaccacttgaaatatgccctgtgactgctattttagacaatacacctccagatcactgacacttaatcagcagtcattcttaaggaatcatcaaaagaacaatacaatgagttgtatacattaactaaaaccacagagatcaagtcagccttaaagggcaaaaatactaaatttctgtcttgcggccttggtactaaatatttcctctgttggaaatacttttctccctttgtcttctgattatcattcggtactcagcttaaacgttacctctagaaagattttatttgactaaaatctaaactagccaccaggtcccttctagtacattgacctctttaaatttctttattgcagtaccatttgcacatctgattcttctgttgttcaatgtgtccaaccattagaatcatgattgtggttgtttcagatcagtgagaaatgaaattctcagctcattaaatggttttcattcactgaacaaatatacattgattacccagttactctaaccattggtctacgtaaaaggatacaacagagaacaaagcattaaagagcactgtggagcttatcattttagtggcagaaggaaaatatctaccaagaaaaatatcagtagtaagtgttgtcatggaatgatatgaggaatctattgttacatttttaaaagcaggtatttctaaaacaagctaatttgtctttaaagaaaaagtgggaggccggacacagtggctcatgcctgtaattctagctacttgagaggctgaggggggaaggatcccttcagcccaagaagttgaggcttcagagagctgtgattgcaccactgcactgcactccagcctgggaaaagaaaaaagaaaagaaaggaaagaacaagtgaaaaattgggggtgtgtttgtatacacatagaaaaatgtccagaaacaggacatcaatacataacaatagttaactaacaatagttagtgttacgagatcttttactctctgctctttttaatatagcttgaactgttcacaagcaagtatgaatttttattgctttttctgatcataagacatggggaaggtgcagattaagtttaaaaaaagagacagatcattaacaccaaacatttctgaataattaggaaatgccacaggactcagagtataaagtcagtgaccttgataatacaatttttttagtaaaaagcaataggaaaaaaagctgtaaagggttaaagaacagggtagtaaagtacttaagcataataaacaggacaatttatacaaaaaatttaacagttgaagatagtaactagatggggaaactgtacaaaacaagcgctttaaaagagatattcgaagaaatgtagaaatgaagtaaggcccaccatagcgccttacttttcacaactgatgaggttatctattgaaaggaagaagcatgagggcttgagggaatagagactggaatagctgttgtgaagagtgcattacaccaaaaagagttaagtctttatctactgatcctgttgctctgtgtaagttagtgccaaaatgggtcttaggatatactgattacatggactagtttttcaaacagggctgcaaaagcaatttaatgagtcactatcaaagtttttttgttaacaaaaatagaaaacagagtttatcacaagtagtttcagttatataatctatgtatgtgttttattcactaatctatatatacatatgtatgcactgcgtcatgatgtaaagtatttctaattatgggtttgaaagccacaattacagaaaacagccaaacatggtggcgtgcacctgtaatcccagctacttgggaggctgaggtaggagaattgttggaacctgggaggtggagggtgcagtgagccaagattgtgccactgcactccagcgtgggtgccagagtgagactctgtctcaacaacaacaaaaaaagagtcaatgtaaaaggacatcaaagccactgccacaaagcccctgcacttgattctactggcagccacttgccacttgattccttgacaacattaagtcagctttcccacgtcacttacttttgattggttacattcactaaaaagcttcataatagctgactggaatcctcatcatgaaaaactgacttagaccctctaaattgttttcaatctctaaaatgtcaaccaaattcaactaaaagagtagccctaaaaatttaaagcacacaattttcactctatctgaaaatggccttgcccactctgaagcaaccatagcatttctgagtttttctcctatctgtggacccctcttcttctattttacctgtggaaattctacctgcccctc[131 bp omitted]gcctcagcctcccaagtacctaggattacaagcgcacaccaccacgtcccgctaatttttgtatctttagtagagacggggtttcactatgttggccaggctggtcttgaactcctgaccttctgagccaccgcacctggcctacctgctttttttttttgatgcttaactaactagtacccaacttgtgcgtgcaaacttctaccgagcagccaagttagcaaagagaaagcccaaaacccatagagtagaataacactgtagactacacattaacatgtc[137 bp omitted]tatggtgaaacgccgtctctactaaaaatgcaaaaattagccaggcgtggtggcaggtgcctgtaatcccatctactcaggaggctgaagcaggagaatggcttgagcctgggaggcagaggttgcaatgagccaagattgtgccactgcactccagcctgggccacaaagcaagactctgtctccaaaaataataataataaataaataaataaaataaaatttaaaaaggcaccaattaattcaaaatatctttcattacatattatcttcatcacagatgctatagtataagtactatcatgatattaaaaagaggtatgtaggccgggcacggtggctcacacctgtaatcccagcactttgggaggctgaggcgggtagatcatgaggtcaggagttcaagaccagcatggccgagatggtgaaatcccatctctactaaaaactacaaaaattagccaggcatggtgacaggtgcccataatcccagctactcaggaagctgaggtaggagaatcacttgaacccaggcggcggaggttgcagtgagcaacagagtcagactctgttttcaaacaaaaaaaaaagagagagagagatatgtaaccagcagtttcacatttgaaagtgtttaaaaacccaggcctagttcaatttttttccatgaggcctccattactgtttttgagttaaattataaaaatcttacaaggatcaaatcctaccatactgccatatttattttatgtaaataatgtgctgtatgctgccgtctgcaatttgctcaacattgttctattaatctatagtcctgttgtagctgtctcttgtccattcattctatccgccacagttcactattattctatgatagtcagaatcacatagtcatgtgatcactgacttggctgtgctccgtgggcactgcttttctgccaggtcctggagttgtcaccccttttgcctctcagcctcccacgggcgcaatggaggagaaggatgagaaagcatgggtgctgctggcccttctgtggcctccagtcacctggctatgacttttgatgctgttattgatgtgtttccttggcttcagcagctatttttgctataataatcctgctgcccttcagactcaggataaacggaacaggcaggtgaacaccatgaaattcatgctgctatatgcctggtattcttggcccaatgtagttttgtgtttctttggtggctttttaaaagaccgagtatttggaatatgatggggcacaattacttttagctgttttatttgcactggacaggttgttttgttctgggtggaatatttaatgttttttggctgatggaatttgaaagacttgtgtttggattggtggggagtgctcagcagttgcccaggacatatgctgtcagctggtttaaagacaaagaattaaacctggtgtctggactccaacaatttagcatggctagaattggaagtacggtaaacatgaacttcgtgagttggctgtattctaagattgaagcttcgtggggttctgctggtcacacaacccctggggtcacacttaagattgggggtataaaatgtattctttcactaatctgtgccttccttggctcttgcttacttagatgcgagagcagagagaatccttcataaagaacaacaacaacaaaaaaaggggggggaagtttttacattaactgatgtaaaggatttctccttacccctgtggctcatatttatcatctgtgtctgctattgtgttgccatgttcccttttattggacttgggaaagttttctttacagacaaatttggattttctttccaggcagcaagtgcaatgaacagtgttgtatatgtcgttatcagctcccacaccccagtatttgggctcccagtggatgacacggggaagaacagcatctgggttctgcgtgtggttgcagccactcttgtgtcccacatgatgctggcctttatgatgtggagcccttgggttgctgtgtcttctgggaatctcctattcatcgcttgcctgtgcattttggccaacagtggcatctgtagttcctgaacatcaactgggaactgcatatggcttcacgcactccattcagaatcttggggtggccatcatttccatcactgctgggatggatgatactggacactgggggatatttgtttttagaagttttcttcattgcctgtgattctatgtgacttttatctgtggtcttactctattttgtgaatcatgcccagggtgagaacctaaattattccacaagacaaagggaagaaataaaattttcccatacttaataagtttaaatgactgtgtcatgagaatgggcttttgcacatcactggtttgaaaatctccatttttaaaaatttagagtttagtcatgagaaaaaaaataatggaatggcaagttgtatttatatccaaatacacctatttcaaagtgtatttgtgagaactattttagcctgtgtcttctgtattgtgtgttgctgaagaattctacaaaaggccaaccaacaatgaaaggtttagaaaactgctctggaacatccaggtgaacttcagaaaagaacagtgaaaacagaaaaacacaggagcttcttttgagattgtcttcattaagtatgtgtctaagggatacagccttttctttatcttacagcagaaaaaaaaaaaattgtgacagacattccctttcctggtaggggcataatgctagaagacatgtgaagatatttgtatgaagtctctttctactcacaaccagtagcttgggctctactatgtggttatgtggactgctgagcagtgacccttctgagttgatttttctgttactgagtcccctaatctcttagggacacaaattatagtacaaacagtctgtacagtttttcatatagtctaattagtaactacaaagtgtccttcgaattataattgacatttacaaaaataaataataaaactgcaaaaggggaaaaaataattttttttttgctattataagcaatagaacatggaacatttgaaacatttcctaagcatagggtttttaccctagaaatgaaactgctaagaccaaatttaagtaattgttcaaagtcactcaactaagaagagtggtagagttagagagctaaccaaaggcagtccccaaagtccatgttcttgaacactacgtgataaaccgcatggcattaccactgatcattccatttccaagcaatgtaggcactaggttcattccctccagaacttcattacagaagagatggcttctgcctctatgtctcacacaggactggaaaataatttataactggaatagaattttgcaactgtaaaagaatgtaattcagagttttggttaactgattcttcattttctatatctacccaaggcaatactacaaaacacataatcttaagattctccagatttttcatatcattgccagtgcttaaaaacaaaataaataaataagacatactccttgaacagaccagccactggtgatgaaaggaaaagagagataaaagttatacagtcatcattcattaataatttataaaatgttataatgatacagtgatatccaggtttcttagactttctggttttgtttgtttgtttaagacagggtctagctctgttgcccaagctagagtgcagtagcgtaatcttggctcactgcagcctccacctcctgggctcagcctcctgactgcaggcatgcatcaccatgcttgacttatttttgtatttttttttgtagagacagggttttgccatgtagccgaagctggtctccaacgtctgagctcaagcgatccacccttggcctcccaaagtgtagggattatagacgtgagccactgtatccaccctaaacttccgtactacaaacctattgccacttctacctgaaattttaatttctgtggatatgagtggttatccatactgtttgataatcagtctgaaaacagttggtataccacaccagtttcagaatgtacatttcatagaaaggccttagggactactgcactggaaagactcattaataaaaataaaaatgtaatgctatataaatatgagtatgactgaattaagacttgtggcaactataggagtctcaaagtaatccttgaacggtaccggttatcaatcacatagactgaaaagagagtggagcgccctctagtgactacatgagggctaatgatggcacagagagataatcacagcagcttttacagaattttggtacagtatttctattatctaattataaagtggtgaattaatcacttaggtctgggtaccatctgagcctatactaatttattttcaatcctataacacccctccccccagcacaagcctctacttcccttcacaggcagttatttaaacgtaaggtgtatatattcacttccaatagtgctcttcaaacaattccaagatggcctctactctctccattccactgaaataattacaagaacctcactactttctgctaagaagttttttaagaacttttttttttttttttttagatagagttctgctcttgttgcccaggctggagtgggtgacacgatcccggctcactgcaacctctgcctcctggattcaagcgattctcctgcctcagcctcccgagtagctgggattacaggcatatgccacctcacctggctaaattttttgtatttttagtagagacagggtttctccatgttggtcaggctggtctccaactctcgacctcaggtgatcctgcccacctcggcctcgtgagccactacgcccggccgacaacaaatattttttaagcattctatgaagtacatggttcttggtagcattctaaaaggcttacttctaacaaacctttcttcattcccctgtaccttcctttgcctttctcaggtcctgccctaggaatatgctctctctttcctgagcaaaggctagtgatctcaggaaggcacagtccagaagtgaccaccagtattctcagcagcatatacacactccagcagagctgccagaaatattgctgtgattcacatctcaattcaacagccaacacttttaaaaatgtacaccaaagaccagagacggttttgttttcttttttgagacggagtctcgctctgtcaccaggctggagtgcagtagcgtaattttggctcactgcaacctccacctcccggattcaagcgattctcctgcctcagcctcctgagcagctgggactacaggcgcccgccaccatgcccagctaatttttgtatttttagtagagacagggtttcaccatg[135 bp omitted]ttaagttagtctgcaaacactcagagcagaaaagaagactgtggtctttgcatctagaaatgtacgacatgaaatatttttaaactctatttctcttcttctactgctctttcacaccactacattgttgtctatccttaagccattggtttaacaattaatagtcagttaatagattatcatagagcataacaataactttcaataaactaggagaaagtgaccattagtttagtttgggataagaacacctagattctaaccagtattcggtggggactcaagtagagaaccatgaaaagagacgatcttgaaagttctccttagccttcttaaaacactgatgtgtgtaatacattctcaattaaaatgtccaaaaattatataactcttctgcctcctgagttcaagtgattctcctgcctcagcctcccgggtagctgggattacaggcatgccaccatgcccagctaattttcgtattcttagtagagatggggtttcaccatgttggccaagctggtatcaaactcctgacctctcaggtgatccacccacctcagcctcctaaagtgctgggattgcaggcatgagccaccgcgcccggcctgaaactattatttttaatagcaataggtcttagacattagagcttcaagcaaaacacaaaaactcttccatgatcaaattcagtacaaaggatattgaatacagccatttctcctgctccttaaaaaataatttcatgtcagtttgccaaaatatttgtggttttgctttgttttgttttgagatggagtctcactctgtcacccaggctggagtgcaatggcgtggtctcagctcactgcaatctctgcctcctgagttcaagtgattctcctgcctcagcctcctgagtagctgggactacaggtgcatgccaccacacccagctaatttttgtatttttagtagagatggggtttcactacattggccaggctggtctcgaactcctgacctcatgatcggcccgccttggcctcccaaagtgctgggattacaggtgtgagccaccgtgcccagcctgccaaaatagtttttaattcagtgtattaaaagagctccattttgaagatgtcagttccattatacttactaaagtgtatctggagggccaataataaggacttcccatcggtagagatcattgtcatctattaaacctgcagaaaagccttccactggatttttgttgagttctgtggaaaaagaaaagtttaatcaatacatttaagcacataatttgcatccagtagataaattacagaacttgagcgtacatgttttatgtaagttttaaaccattaaatagatataccttgccaggcaaaatgctacttgatggccaaaacattttcatgcctatactgtaagaaagccctgggtaaagcaaactatccagaagatcaacttctactggtatccagccaggctcttgtcattctaagtggccctacagtggtcttttaaggaagcttgttaaaatgcagatatccaggcccgtcccccagagattctcattgagagggagccctggaaatcaaatcatgttggcaattcttatgctgctgtcttcagggtatactttcagagtgtctaatcataccttttcattggaatgtactgcgcttaataactttcatttatactaacatttgtacacctatttgacttgtccctgtagtcttggggacctgcttctacagtgggtgctcctgtgtgcccatccatctctgagcacaaggagagcaggggccccatatgtcttgtctgtatatgtcgaccctctgagagccacagcttctgggacagaggagcagcttaagagtaacacctggagcatacagaatggctgcagcatcgtgaggttctcctcctctaaagagagtgctgtggcatggagaaaggatgacagggtgggaaacaagagaggcgaggaactggcaaggtgggggcacacaggccaagacagggaccttaaggagcaggtgagcagcggtacagagcccagaatgtttccagagacaccagacttaataaagtactggcctcctgatggtgagcagatcatgtgagaaatttttaaacaactttaatgaggtataactgacattcagt[132 bp omitted]gaaacgccgtctctattaaaaatacaaaattagctgggcgtagtggcacatgcctgtaatcccagttactcgggaggctgaggcagaaaaactgattgaacccaggaggcagaggttgtggtgagccaagatcgcgccattgcactccagcccgggcaacaagggcaaaactctgtctcaaaaaatatataaataaataaattagctgggcatggtggtgtgtgcctgtaatcccagttactcagaaggctaaggcaggagaactgcttgaacccgggaggcaaatgttgcatcaagccaagatcacgccattgcactccagcctgggtaacagagcaagactccatctcaaaaagaaaaaaaacacacacacacaatttaataagtactgatatacaccagaggaaccaacacaacaacaatcacaatagtgaatgcatgtatcaatcacccacacaattatcacattttaccggccagtggaactgagtactcattggctcaaattggaaagtgtggacaaagaacacacaggagtagagtggtttgaaaaggacttgctgggagtctcaacaggtgtgtaattctcgtatactacctgccatcattctcaggcagctttgtctaatgatgaaaggcagtataatataactcagagtgctacaaaggactgaaccaatgtttaggtaactgaggagatattaatttttggggaaatcaagagatggtattatttcaacaactacgatttaacaacatgccagcaaaataggagaaagccaatagtgaaaatttatatttaggcagggcgtggtggctcacacctgtaatctcaacgctttcaggaagccaagatgggtggatcacttgaggtcaggagttcaagaccagcctggccaacatggtgaaaccctgtctttagtaaaaatacaaaaattggccgggcatggaggcggacatctgtaatcccagctactcagaaggctgagacaggaggatcacttgaactggaaggcagaggctgcagtgagccaagaccatgccactgtattccagcctgggtgacaatgcgagactccgtctcaaaaataaaaataaaaaatttatgtttaaacatgaagtgcttcttttcttgaaatgtgaggggagatttttataagtctaacatttttgcataacaggcaaactagacttttacaaatagttaaaatcagctctgtatttcaaaacacaagaaatgtacttttactttaaagtggctaatctaaaatactttttaaagatattgaaagtgcaaacacattaagaagggaacagcattttcactgttattttgtttatgcacgcatatgtgtactgagcgccaactatgttgcagacattctattaaaaaacagaaagtcccactttcctgtcaactgaggaacagagtgcagcacacacaaatgcactgtgaggagttattttctacatgactgatctcatttccaacctttttctagagaaacaccattacattactcggaccattttctacaacactgtacacaagagtcttgtgaaagattctataatatatccagaaatcacctagttgttgcattttccaccagaagtccagggtttataaacataggtgagtaagctctgaaattagtatacatggtcaaaattacccttgaaaatttccttacactttccataaagcatatcattgcttcttactcttgtcaaaacccccaagttcttgaaatcttttgcccattctttccatgcatttcttctacaggcataattgtgtcctttgcttgttccatgtaagtaatacaaaagcaatgttgaaaaatgtccaatgtctcacttttgtcatggcttcagcccccagcatgaatcttcctaggtctagatgcatgaatatttaacaggcttaatccatttaaagtgatagaaccttaccatgccttcatgaatgcttccttcaaggtctctatcaatactagccccctccatgaagtcttccctaaataatttatcaaataatcttttggcttctgctaaattcctattaattgtactttcagtctatctacatcttctggcacttgaccaacatcggctcctgatccccagagaagtaaacaggcaattacaatgtgctccaacaacagtacaagaatttgagggcacacaaaaaagaagggcacataacataatcatgaagaataagaaaaggcttctaaaaagaaaagaaataaaggatttgggtgagggaattcaaggtttagaatctgaaccctactttaggtagaggagcatgtacaaaaacttgaaatagggcaatcagtatgtgactggaacggcggggggcaggggagcagctgaaactaaacagaatgtcaaaagctggacagcaaagggcctttgtaagccctgcatgcttggactttatccagagggcaatgataagcctttgaagggtggttctttttttctttttcttttaaacaatggagtgacctcatgagatttacatttgcaaaaaccaatcttgtagtatgtagaagattgtttaaaaaggcatgatgagaacaaagaaacaaaaagcaagcaattcaagtaatcttgaaaagtgtacctcgagtatatagtagtcgaaacaatgaagaaaacaaggctatttagaagagaatcaatcaacctaacctggtgatgttaaagaagtggggcttaaagtagtaagtcaaaaatgacatgagctgggcatggtggctcaccgctgtaatcccaaaactttgggaggctgaggtgggcagatcgtttgagcccaggagtttgatgccagcctgggcaacatggcaaacccctgtctctaccaaaaaaaagaaacaaaagagtacaaaaattagccaggcacagtgatgtgcacctacagtcccagctactcggggaggctgaggtgggaagatgacttgagcccaggaggcggaggttgcagtgacctcagatgacaccagggcactccagcctgggcaacagagccagaccttgtctcagtttaaaaaataattttttttaaaaaaagtaaaatgacatatgattaaaaagttgagcagagttaccatatgacccagcaattccacttctaggtatataccctaacatctgtccacacagcaagttgtacatgaatgtctgtagtagcatttgctgtaataatcaaaaggcagaaactcaagtgtccatcgacaaatgaataaactgcagtatatacatacaatgaaatactattcagccacagaaagaaatgaagtactaatatatgaagctcagtaacatcaggctaagttaaagaagcagacatataaagtcacatgttatatgacttattctatatgatatatccagaagaggcaaatccagagacagaaagtagattagacaatgagggaagggagaaagggggcgtaattacttaaggggtatagggatggcgatttaatggtgtgatgagaacgtctgaaagctagatcgagctggtggctggctgcacaacatcgtgaatacacgaaacaccactgagtggtacactttaacaccattacctataatgtcaattcctccctccctgtttttctgacaccagatttctgtgcaagggtagaaatctgttcattcactgaaatgagaaacataggaggaggtttgtcaagagaggggaggaaatggtgatgggcttggtattaaatgccttttgttagggacaaaaaatacattgctttaaaaagaaatctactgggcacggtggctcccgcctgtaatcccgacactttgggatgccaaggcgggtggatcatctgaggtgagggagttcgagaccagcctggctaacacagtgaaacctcatctccactaaaaatacaaaaattagccgggtggtggtgggcgcctgtagtcccagctacttgggaggcaggagaatcgcttgaacccaggaggcggaggtcaccgagatcatgccactgcactccagcctgggcaatagagtgaaactccgactcaaaaaaaagaaagaaaaaaaaatctgagctgacgatagagacttcagggttatcagaatatggctgatcactgaggttgtaagttgatgcatcacccaaggataagcattaatataaactgcaggggatgtaaccgaatgaattctagaaaatattaacaactgagaaacaaaaaacaggaggcggcacaaggtaaactgagaaaggtaagccagtgaaatagggaggccgaggcaggcggatcacgaggtcaagagatcgagaccatcctggctaacacggtgaaaccccgtctctactaaaaatgcaaaaaattagccgggcgtggtggcgggcacctgtagtcccagctactcgggaggc[131 bp omitted]aaaacattttattaaagctaaaggagatgcatttaaaggagaaactatccaatgatgataaacacatacagctcagggaagaaggggtctatattcagtccactggattcaattaaaaaaaaaaggccacagttgccctcggcataagcagtgtcagtgtgaaggtaaggtggaatccatgcaggcaacgctgagtggacaaagagaagatgaagtggaaaaacccaagtggaaattttttctaaaagtttgacggtagatggaaaagtgtagtagtcacgggtaaatgaaattcaagcaagttttattttaatggaaaaggctgaaagatgttaaaacatcctatctgtgtttaaatgttgatacggatacctcacactacatccaaatccagacagattacagatataaacaaagaggtataaaacctaactaaaagaaaacatagaatagtgttttttcacatcaatttgagtggaggtggtcctcctatgcaggacacaaaactcaacagtcaaataatgctacacaaaatactttaaggttagtacagcaataaagtctaaatacaaatgactgggaaagaatatttgcaaaatagggagaagtttaaaattcctaatacaaacagagcttctgtaaatcaaaagggaaactaaaacccaaaagtgaccatgcttgaccttctacttatattcctaaggtattaggagttttgagaatgccaaagatgaagataacatcttttctgaatgctatctagagataaaattaagagttggaaagggctagaaagacctctctttctcacaaaagtcatgactgctaaaacacaaaagtttatagttctaaaggaggcaaaactaaccaacagtattacaaatcaggacgatagtatttctctctctctctctctctgtcttttggagcaggaagtgagagtagtatctgggaagaggcatggaacggacttctggtgtactggtagaggcatgccgtccgtaatatgtgcgtactttcctgtcaatgttatacttcaatttttaaaactcagtaaatcctggagtatccagtgactgttaaatgggagttatgcttgcatgctatgaatctggaaatcactgtgggccagagtggtctacaagccatgaataaaaaggaaacccagggacaaggtagtgtccttgagagtaatgacttctatgtgttaagtcatggaaaataatgcatgagcagacttgctaagatagagtcattaccaagaataagactaaaaaagaacagaaagagcatatgaaaagtaaaaacgctgcatttctgaatcggaattagatgaatataaaatgacattgctttcaaatatatagttctcagatctatccactgaaaaggtctagaaaaaatgaacagcccagtagtgcccagaatatggtttctaaatatgaatttatcactaaaacggaccagggctcttcagagaaatggctgactccaggtctagagcaagaaatgttaggttcatctcacacatagcagacaaaaaggaagctatcgagtaatactatggtattgtggaaaggactcaagagccagcttgaagaggcctccactggtcaaatatgggacaatttgagtgtcaataaagttagtaacaacgaatgcttgaaatatgcaagtttaaatccatgagtttataactgtgaaatcaaaaacaagaaacaaatttatcaccactacaggatgctgggaaaccattttgttattctgaaaaccaattttaaaaagcaaaagaatcaacatttagtgtgatccttttttattacacaaattatattgccaagtaatcaaaatagtaattactatttgatcaaatgaggtttctctctataaaaatactccagctaaaaaatgaaaaataactgaaacattggccattttatcatttaatccaggcattttaaaagacaaccagatattacagtctcctgaaaaatgaacaaaccaccacatatgaagtaatctcacctcacaaacctaacctgtttgagcccctaagtacaataactaattcacaaagaacagaaacagagaaacatgttcaaggacatccctgggacacaattagcaagatctactctgcaggatattctaaagaacaagacctagaatcttcagcaaatatactgcaaggagcacaaaagagagaaatgaattcaaactttttttaaatttatgacgattatgacacaaatgaaaatgtgaagagtaatgagacattagacaatatccagaaattgttgtttcctttttgagtttggcagtggtgttgtgctgggggttttcttaccatttttagagatacatactgaaatatttacagacaaatgatcatgtttagaatgtacttcacagtcattagggagagggctaagataggtgaaacgaggctgatccatgacctaatcacttcaggggctgggggagtacatggaggcccattatacctatctgtctactttggtattattgggcatttaaaattttcctcaaaagatttttttaatctaaaaataagtttaatatagcctaaaataatgttttcagtattgtcgatcattatgtaaaagtaaaacttcactgcacctcagcaaaatacaaattctcagaataacattccaagacccaactagacgtcattttgtacttgactactaagaaaataagctacttttggccgggcgctgtggctcgcgcctgtaatcccagcactttcggaggctgagacgggcggatcatgaggtcaggagatggagaccatcttggctaacaccgtgaaaccccgtctctaccaaaaatacaaaaaaatagccgggcgtggtggcgggcgcctgtagtcccagctactcgggaggc[131 bp omitted]caaacaaaaaaacagaagaaaagaggctcctttttttttttttttttcctccctgagacggagtctcgctctgtagcccaggctggagtgcagtggcgcgatctcagctcactacaagctccacctcctgggttcacgccattctcctgcctcagcctctccgagtagctgggactacaggcgcccaccaccacgcccggctaattttttatatatatatgtttttagtagagacggggtttcaccgtggtctcgatctcctgatctcgtgatccgcccacctcggcctctcaaagtgctgggattacaagcgtgagccaccgcctaagtgtactttgccaagaccaattgttggctaagtctaacttctacaaagccaaatacaaactgaggtttacagcctagtaacgattttcctttgtgtctgggtgactgtggtctcctgctccgggaatgtgagttcctgtcaagtttatttatacaacacagttggctgcaaggtatatgtctgtaaagtaactatttttactgcagcttcactttgaacttctgagatcatagatagacagacccctttacccaaacagtacataattactcctaactattgagataatttgtcaaaataattttgaccttattatcagaggaataaactgctgttaccttaaaacataaaaatgccacaaaccaagtcaccaaaagtaactgcaaaaacgttcccgtccttcaaccttccattaattaatactgaaaaaagtcaagcatagcaatcacaaaggtgtatttcctctttagatttcaagatgcatcaagttaataaattttacaaatttctggtaaactttaaaaatttgcttaaaattagaattttttatttgtaccacgacacgggctaccggctagctgatttcctaatcaaaaacatttttggccaggcacagtggctcatacctgtaatctcagtgctttgggaggtcaaggtgggaggatcgcttaagggcaggagttcaagaccagcctaggcaacagcaacatagagagacccagtcctagctactggggacgctgagtcaggaggactgtttgggcccggaagtttgaggctgcagtaacctaagaaggtgccaatgcactccagcttggagcaagaccatgtctcttgaataaaaaaaaaaaaaaaaaaaatcaaggccaggctcggtggcctctaatccgaacactttgggaggccgaggcaggaggatcgcttgaacctagaaatttgagaccaggcttggcactatagtgataccctgtccaggtgtggtggctcacgcctgtaatcccagtactttggaaggctgaggcagggagataacctgaggtcaggagtttaagacaagcctggccagaatggtgaaaccccatctccactaaaaatacaaaaattagccaggcgtggtagcgggtgcctctaatcccagctattcaggaggctgaggcaggagaatcgcttgaacctgggagaaggaggttgcaatgagctgagatcgtgtcactgcactacagcctaggcgacaagagcgagacttcgtctcaaaaagaaaaaaaaaaattagccggacatggtggcatgtgcctatatagtcccagttactcggaaggctgaggtgggaggactgcttgagcctgggaagtagaaagtgcagtgagccaaaaccacaccaatgcactccagcctgggaaatacagagtgagaccctgtctcaaaaaacaacaaaacaaaaaatattccacccaatttattttactgtgcttcaaaaacataaggaaaatgaaacagacaagccaaacagatcagagatgatcccttaaaaagaatttgtcaatatgcttcccaaagggatttgcttggcagaattctggaccacattcctaaaataacacttactgacattctgctacctgtaatatttcaccctgcttatcacagcttcttcaatcacaggcgtcagggttcttcaatattaagtcctaagtacgttgttgcttgtgcataaattatacacaatagcataagcatgcatctctgccaagatttgtcgcagcaggaactcctcacaataccgaaattatgccctaacactagtttatagtgtcacacaaacagcttactttgatctcgcctattttatagaaataaatttgataaagatgattcctgaggatttctgaatgtcacttcacaatggaaaatttgggcacagcatatgatattatgtattactagcctgggcaacttaaacagatcatttctattttttgagtctcattttccttatcagtaaaggatggtaaagcccttggtaacgttgcaacacggagaagatattgtatatgcgaaagtctgacccagcttaaggtacaataaatgttagttgtccattttcttcctttaaaattgctcattaattaggctacaggacataaaaggaatacgtctgtattcttcagaatcctgagaacaagcccatacctgaattatttcttttggaaaatactacccagcttcaaacctcacgcccaactatgtttctagtaggactgccaaacaaggcccccggtaccccaaggccacaggagggagtggtttttcagagttgggaagctgtgccataaaggcctgagagctgccaatagccgcaattcaagtctcaaggagaatgaagccaaaacgaagaataagcaacaagaaatccaaacagatctttgatttcttacacctggtactactcctgcccttctataaacttagttagaagtcagttttcctttttgtctaaatttattttagttgaattcctgtcacttccaactaagaatgccaccttcttcatgtgtaaagccctatttttaagttcacatcccagttggtccctaatcagtttcccctcgaatacaccagtggttctcaactgtccttttaccttccccacattatacggggcaaaaaagtgattctcaggctgcagtgagtcgtaagcatgctgctgctgaaggaagcaagcacagtcatgagattcttgaatttccaattcactttaagttcatttcaaccaccaaataatacatataaaaaaccagaaagacttcagaaaaacagtctcaaagaaattacagaaacatatttttaaagaagaccagaaagaaaacattataaagcaacaggagaccttaaaggaaagtgaaaaacagactaaaaacaaatcatggtcataactttcagaaatcatacttctaatgaaaagataaatagttatttttaaagagtaaagataataaacaaaggagatttacataagttaaactggcattcctgaagagatcagaatattaaaatgtcataaatctataaagctttctataataataaatatacagattgaaaacatatcccacaactcagaaaaaactggtacagaataaacaataaaacatctgtcaaatgaggcactgaactttaaagttaaataatatcaaggatattcaggaagggaaaaaacaagtccagtataggtgggtgggtggaaccaaccaggttagcctcagatttctccacaatactcattgtaggtaagtaacagtgacgtgaagaaatacggaatcctgaagaagaatgtgataaaaagaatgagaaatgcagccaggcatggtggctcatgcctgtaatctcagcactttgggaggcccaggcaagtagatgcttgaacccaggagttcaagaccagcctggacaacacagggagacaccacctctacaaaaaatacaaaaattagctggacatggcggcaagcgcctgtggtgccagccactcaggaggctaaggtgggcagatcacttgagcccaggaggtcgaggctgcagtgagctgtaagcatgctgctgcactccagcctaggcacctgtgtcgaaaaaaaaaaaagagagagagagaagcccaaacaggaagtccaaataagatggtaatacacatttacatgtattgtaaactttaaggacttaagaaatggtactttttgaattaaatgctgcgaaatcaatcaaaataaagaattcagtaacagaaaaacgcaggtgaaagggaccagtgtagttaccaaccccatgtaaatgcataaataaaaccaaaccaccatgaatgctataagcttttatatatatatatttaataatatatgctgtcattgccaagtggcacacgtgtgtgtgtgtgtgtattattttcttgttgccattggtcctatttttacattatcaggatttatatataaatttacattgtcaggattttacattgttattttctgtattgtcgtaattttacattatcaggatttctatgttaaaaaagaataaccaattactaaatatatctatatttatgattagaaaatgggaagggaatggagggaaagggagagaggtactaaggaatacatatgtgtttattccctcatcctggacatcaggaagtcagtgggttctatcaagagtctcaaaactatttagaggtttttatagattttcttctctcaactttaggactcttttagaaattaatctcttcttgcgataaatgtctatctataggtcaataatttcttcaatattaccttagctgggttgtcattcatatgcaacttgcaacttaaagtatataaatggcacatctattacaacctcagatttcagcccgcatgcatgcactgaaaggtggatgcaaggatgcccaacgttgggagacatctgtaggtggtggttgttattactaagtagtagaatattttcaactttcttttatgtactttgattttttaaattatgaaaaaaggccatgtatcctaaagtaacataggaaaataaaatagaaggcattagacactaccttcttgctctccaaagacaaccactgctaacaatttgctgtgtattctttcagacttaggctacaccaccatatactatacagaaatggaatcatccttgtataactgatggccacttagcatagtctgaacactagataactcgttcccaccaccatacctcttttcgttttccccctcaaatataaataatgctgcctaggtatgagctgagaggagtgaaaaaaacaaaaagtaaaaaaaagaaattatgaatatttaaaagtctttttaaaaataaataaaaagaaaaaacaatgctgccattgccaggcggtgtgaacctgtagccccaactgttctgggggatgaagagggaaaatctcttgagcccaggagagtctgaggctgcagtgagctatgatcgcaccatggcactccagcctgaacaatagaggaagaccccatcttaaaaaaaaattaatttaaaaagaatactttgcactctccttgtacatctgtggaagtatatctagaatataaactataaactgaactgtaagtcaaaggaacatatatatcaagccacaaaatgtttacttcaatgtattatcccagaaacactgtaggcaactatttccctacagccttgctaacactgggtacttttactgctggctaacactgggcatccttctgccactggcaatttatctttggtgcatttacatatttttattcccccaccccgttttttttacattgagtgattctcttttttctgattatttggatgggctttttaagcattgtggccttctttctttttttggagacagagtttcactctgtggcccaggctggagcgcagtagtgtgttcatggctcactgcaacctccgcctcctgggctcaagcaatcctcccacctcagcctcctgagtagctgggaccacaggcacaaaccaccatgtctgtcttttttttgtatttttggtagagacaaggtcttcctacgttgcccagactggtcttgaactcctgagctcgccccccaaccctgcccacccaagtgccgggattacaggtgaacccagccaatttgcccaatgtttgttgctattacttagagtctaagggatgaaggcaatatttacatttaaacccctaattttcctaggctattagtgtgcgattcaaatgtgtgtctataaagtttattataattaaagcaaaagtttgaaatttgaaaattagcaacataatttttcttttttatattttgattggactaagtgtggtatgaaactcaaaagccaaacaagtcagaatgacagctttgtctacattttgaaatgcaacaatctgaatgacaggtttctaacatatgaccaagtattaaactacttttaatggaagtataagaagtggattcacataaaatgcacaaagttaaaaactggaacaggtaatacaaatacaagatgttctactcacaaacacatattaagatggtgttgattcctcattcctctaagtagtctccacccacttcttgacataagaaagaaagaataatgtaagcagcagaccatgccaggtccaatccaagatttcttccaaaggggaacaacaggtgtgattatgtcaaagtagctgtgatctgctgacactaactcaccctctgttgtatcttcctatcatgccttgaactcctcctcaaactcttccctaagatggcattaggagattatatttctctaattcaaataactatttatttgtatgtgcttcttctccttataatcacattagcaaaagaagagagccctgctgcatgatcagaaatgttgtgcatgaaatataacttctactgaaaggcatcttgtacatgatcttctccacattaagtaaaaatggcttctaagaaaatggggtgtcctgggaaaatacaggtgaacctatgtaagaggcctaggaaagtacaaacactgaaagaaaaaattggaagtaatgcatttatttaaaggcaagggaaccaaaagctgagcccctgactttaagtatatcccctgtatcacacataagactgtttctatgcaacagaaatacaaatggaaggcaatgttgatgtctaacagttacggtaatacttcatacaaaaatgtataaccaccagcagcatggaaccaccgagcactgtggcaacagcaatgtgcatttcatatctccgaagtgatggaggtgaaaggagagaaacaggagaatttggtgagcagctcagttgcaaagcaagccctgaattgtttgagaggtttaagaacagtacataaatgcataacattaaatatcactgataaataaattagcttctgctgatagcgagactgcaacaaactttcccccaatgaattgcagaaaactattaataaaggagaaatattggaaagcaaatttataactgacaaaaatagacctttcttaaagaatgccatcttgtgctttggtaagaaatttaaaaagaaaacgtgtcaggctaacattgcttttatatttaaaaaattgagcgatgttaagctaaagcctttgctgatatactctgaaaacccaacaatacttaagagcaacctgtaaaacaaaagtaaggactcatcacaacctatgagattaaatatcaattactgatgccgtttctgatgcaggatgatgatgaagacaaaactcctttaattaaggattttaaggaagaacctaagaaggcatacgaattcatcaaaatgaaaatgaattaatcagataagaaactagtccctttcaatttattgctgacctccaaagtttagagaaagtcatctcccaaaggaaaaattattagatcttactaaggagactgggctgagagaacagctttgtcgcccaggctggagtgcagtggcacaatcacagttcactaaagccttgacctcctggactcaggcaatcctcccgagcctcctgagtagctgggtctataggtacatggcaccatgcccaattcatttttatattttttgtagaggcagggtttcaccatgggcatcatggtctcgaagtgggctcaagcaatctgcccacctcggcctcccaaagtcctgggattacaggtgtgagccactgcacctggccagtaactagtatttttaatgctttatataatggaagaaaggggtggaaatttgttacatagatatatttagagcatttcatttgcaacccttaatgtaataatccaggcaaggatgatcaatggatgctaaaaccattaagtgaaaaggtcactggagaacagaatatgatgcccaagcatcaccccacagattactcaccagtaaaaagagataatgcatcttcgcaacggagaaatctggcaatcaccaaataattgttcgaatttagaaccattaacccaagaatgtgtatcttcttatttgatgcaaaatggtatacacaagcttcatctatgacatactcttgcccctcccccaaaatgtttacactgaatcaaatcaagcttcttaggttagacctgcactttctaatataatagccactagtcgcatgtggctactgagcacctaagaagtggctagtcttacttaacatgtgctgcaaatgtaaaatataaactggatttttgaagactttgtgagaaaaaagttatgctgattccatcttgaaattatattttgggtatattgagttaaatgaattattaaaatgaattttacctatctttttacatttctaaatgtggttacaattttaaaatcacacattaggctttcatgtgtggttcccatgtttctattagatagtactgctacagtttgcaggaaatctaggggatgtggaaataagtgaaacaattgctttatttataaagtgagataggggtctcactatattgtccaggctggtctcaaactgctggattcaagtgatcctcccaactcagcctcccaaaatgctgggatcacaggcatgagccaccatgtccagccagttaaatgatttcttgagaaaataattagaaaaatccacaatgttgaataggatactctatttaacaactagtttaaggccggg[249 bp omitted]gggggacagagcgagactccgtctcaaaaaaaccaaccaaacaaacaaaaaaaacaaaaaacaaaaaaaaaaagtagtttaaaatcttcaaaaattcaatctgaagaggattcttagggccatcaaagtattctgtatgatactataatggtaagatacacgtcaaatatttctctaaacccatagaatgtacaataccaaaagtgaaccctgatataaatgatgggattgtgggtgatgacgtgtcaatgtagtccatcagtcataactctatttcagtagttttaaaacttcaaccaactatttcttcacctgctagcagttacatggtttttgtttttaaataactcttaaaattgtacatatttacattgcatgtatcacacatatgtacactattctgtataagtgaatatatgaaagagacatatgctggaaagacaaaagtaaaataaagagagcttaagagacttctaaacaactgaatcttttcctcaaacacaaaaaaatccacccaaagcaatttacaaatacaatgtaatccctgtatcaaaatcccaacaacttttggaaaacccatcctaaaattcacaccccaaattgccgaaacattcttgaaaacaagaacaaagttggagaactcacatgtcctgattccaaggcttactacaaaacgacaataatcaaaacactgtggtattggcaaaaagacagacataatatacaccaatgaaacaaaataagagcctagaaataaaacccttgcatatatggccaactgattttcaacaaggttgactagaccgctcaatgaggaaagaaaatctttcaataaacaacactagggaaactgggtatccataagcaaaagaatgaaggtggattctttccttacatgatatgcaaaaaataactctaaatgaactgaaaacttaaacgtaagagctaaaactttaaaactctcaggcgaaaaaataagagaaaatcttcaagacattggatttagcaacaaactcttggacatgacaccaagagcaatagagacaaaagaaaaaataaatgatctggatcaaaatttaaaactttagttcatcaaaagcaacccccaaaaaaatgggaaaaatattgtaaatcacctatctgataaaggattaatatccagaatacaaaaagaactcatacaactcaataacaacaagaaaaccaatgcaaaaatgggcaaatgacttgaataggcatttctccaaagataaaaagatgtctggtcaacaagcacaatgcaaagatgctcaatatcactaataatagaagaaattcaaaaccacaatgagataccacttcacaccaattagaattgctattaaacacacacacagaaaatgacaagtgttgacaagaatgtagagaaattagaaccccatgcattgctaatgggaatgtaagaggatgcaaccattgtgaaaggcggcatggcatgtcctcaaaatattaaacttagaattaccatatgatccagcaatttcacttctggttatatatgcaaaagaattaaagcagggggtcaaacagatgtttgtacaccaatgttcaaagcagcattattcacaacagtcaaaacgtggaaacaacccaattgtcaaccaacagatgaatggataaacaaaatgtgcagtatatacatacaacaggatgttactcagctttaaaaaggaatgaaattatgatacattctacaacatgaatgaacttgaaaatattatgccaagtgcaataagccagatacaaaaggataaatattgtatgagtccacttacatgaaaataccttgcagccaggtgcagtggctcacacctgtaatcccagcacttgggaggccaaggtgggcagatcacctgaggtcaggagtttgaaaccagccaggccaacatggcaaaaccacgtctctactaaaatacaaaaattggccaggcacggtggctcacgcctgtaatcccagtactttgggaggccgaggcaggtggatcacctgagttcagaagttcgaggccagcctgaccaacatggcaaaaccccgtctctaccaaaaatacaaaattagccaggcatggtggctcatgcctgttaatcccagctactcgggaggctgaggcaggaagaatcgcttcaacctgggaggcagaggttgcagtgagccgagatcgcgccactgcactccagcctgggtgacagagcaagactctgtctcaaaaaaaatacaaaaatacaaaaatagccgtagtggcgtagtggcgggcacccctaatccagctacttgggaggccgaggcaggagattcgcttggaaccgggaagcagaggttgtactgagccaagatcacaccactgcaccccagcctgggcaacagagcgagactgtcacaaataaaagaaacagaaaaagaaaagaaaataccttgagaagtcaaactcagagagagaaaatagaatgggggttgccaggggctcaggataaagagggatgaggagttaccggtttgtgtgtttgtttattaagacttagttaagtacagtagtgagaagggggaagagtagaatggagtagttaaaaagtccaatatacatatcagaagtgtgggacacatcaaatggaagccaagcatattcctacctccttgtgtggcaggtcctaaaatacagacggactgtgtcattactctgaatcaccctcaagccttcgacgtggcccacacccaaagacagcaccattaataacctatcacgtacttaggattcctcccaatacagtactcagcagccacacccgccaaataaatccatgatgagacatctgccatccttgccttaacataagtgacctctgagaacaaatctgcccttctcttccttctgcaggaaccctttctcctttcctttgtgtagagcttctcctgtgaaaggcccattttggcccatgtgcagtgcaagtagaccgatactctcagtctcactgttaaagaaagagagcagaaataactccgaatggatcaccaaaatttcttagttttggaaagaatatcaaattccaccaagttgcaagtcatcatttcagagaatggaaactcaaagccttgactagaatgatggttaatctggttctcccagctgagaacccatatattaagctaaactagtctggctttatttaaaaactaagtaaacaaaatgagaaatgcttttcacaagttaatttttaaagtaaatgtacaaggtgtatattgttttatgttgtccaaaatatcaacatactggttttgcaaaagccctttactaccgtatgcatacaaaaaaagttcttcccttgggtgatttaatagacctagtaaatgtcagataacttaaatattttcgccagcaagagatacagtaaagtctatgattttgatctgaattcagtgccctgtaccctgactactgcagaggagaaggcgataaaataagaggatgctgtcatgcttgctccttagcttcttttgcattcctctacatcttattccatttacaagtttatctgtgtgaggtaccaagaacccataaaacaaccctgaagttatttatacatttattcaaacttataaaagaaacctaagcacgtagaaaattggaatgtagctaagtttttttcaaaaacaaattaggaaattattgactgccacttgatgggcttctgtgctgcactaacaacatgacaatggtgggcggggcgcggtggctcacgcctgtaatccccgcactttgggaggccggggcgggcagatcacgaggtcaggagatcaagaccatcctggctaacatggtgaaactccgtctctactaaaaatacaaagaattagccaaggatacaaaaaattagccaggcgtggtggcggacgcctgtagtcccagctactcaggaggctgaggcaggagaatggcgtgaacccgggaggtggagcttcagtgagcagagatcgcgccatgcactccagcctgggtgacagagagagactccgtctcaaaaagaaaaaaaaaaaaaaaaaaaaaagacacttctgtaatcctagcactttggaaggccgaggcaggcggattgcctgagctcaggagttcaagaccagcctgggcaacatggtgaaaccccgtctctacaaaaatacaaaaaatgagtcaggcgtggtggagtgtgcctgtagtctcagctactccagaggctgaggcaggagaactgcttgaacctgggaggcggaggttgcagtgagcagagatcgcaccattgcactccagcctgggtgacagagcgagattctgtctcaaaaaaaaaattagccgggcatggtggcatgtgtctgtggtctcaactactggggaggctgaggcaggaggatcgcttgatcccaggaggtagaggttgcagtgagctgagatggcaccactgcactccagcctgggtgaatgagactctgtctcaaaaaaaaaaaagagactgagactcttctttccactattaaacaacttcttagaagacactatttccataatttaaggactttaatatatttaaaatgtaagacatttttgtggttggttaaggatttcaaccatgactgaaatcagggttgtcttcaaaataatactgatgtattttttgtaaccaattcataaaccatctctctctttccagtataactttttcttactatcctgactagtccattgccattaggcttttttaaaggtatgctttttttttttagatttatagtaacgtcagtaaggttctcttagactaaaactaaataaggactaaactatcaccagtagcagttcctaatcgaattaagccaaacagtgagaaattccctgatgacaattcatgactcaccaggagaaagcttaagtatcgtgctctttgagtggaaagactagcttagctagactacccagagccatgagttattgcatctacaaagttttacacgtatgacgtaaaagactagtttagctagaccacccagagccatgagtcatgcatctacgaagttttacatgtatgaagtacattcatggaagtgtctaacaatttaacaccatctatagtatggggcaacaggagacatggggacagcaacaatcgaaaatctaaatgatccacagatttttaacacaagccaaagcctaattgtttctaaatcaactgccgccaagtttctcccaggcacttttccatacgccactccaaattcaaagctatcttcacattttgcatactcttatttgattttaggaatgggaaacattactctaagtgtcaaaaaataaataaatgggaaagcctacttagctggatgattttaaaaaaataaaatttcagccagtcgcggtggctcatgcctgtaatcccagcactttgggaggccaaggtgggcggatcacctgaggtcaggagttcgaggctaacctgaccaacatggagaaaccctgtctctagtaaaaatacaaaattagccaggcatggtggcacatgcctgtaatcccagctgcttgggaggctgaggcaggagaattgcttgaacccaggaggcggaggttgcggtgagccaagatcgcaccattgcgctccagcctggacaacaagagtgaaactccatctcaaataaataaaatatattttatttatttatttattaattagagacggggtttcaccatgttggccaggctggtttcaaactcctgacctcaacagatctacccaccttggcctcccaaagtgctgggattacaggcatgatgagccactgtgccctggccagaaaaataaaatttctaaatgccaaaatagccataaaaaattaaaaggcaaataattactcttataaacctttaaaaccacacacacacacacacacacacacacacacattccaaactgtcaaggtgttcacctttcttgggaatttttaaaataattttctttttacctagcagaatcaaacattttttaaagttcctggtggtatgaagaacacaataaaaagtggcactttgatacagttaatagtggaaatacaaattagcaaagcctttctagaaggcaatcagtaatatttatgaagaacctcaaaaatatttattttccttaactaagaaatgaccagaaatttatccgaagagaaataatcaaggattatgtataaatgttttcataaggaaaatccacagaagcactaattataatttaagtggtttacaactataatttgaaaacccagaagtcaagatgtggggaatatgatagtagcagcatatgaaggaatgctatgcatctatttaaaatactttacaagaatatttcaggacatggggaaatatttacaatttttaaaagataagatattctgaatatatctaactcttaaaacacatacactacacacttttgacaacaaaaagctttggcctaatcgtgtcttctagttcaaggtgtcagtgcgggcacatgtgcttatctcctcttccctcctaagaagttaaataaatttttctaaagaaattaaaaaataactttttaatttaaagtatattaaaaagaccaggtggattgcccatggctctgaaagatgaaaacggatggaagaacgtgaactgagtaagcagagtggagggagcagagagcagaatactcacagaggagctgcagcgaaggaggaaggctaatcttctgggcagaaccccagagaggcgccagttcagtgaccgtcgtacgagggagatcagtagtgagaagtgggactgaaaacatctgtcatagcaagaagtcaacagagaatgtctaaagttgataaaccaaaacataaacactataaatatattatttagaagcatggagttaagcccccaggagatctgaacctaaaaggttttaaaaagcagttgcctctggggaattcttcattatccttcactgaatgcattgttcactattaggcctcttgaatcactggtatttgattatttgggttttttaaagctaagtatatatacatatacataatgttgatttttaagtttttattctttttttattttacattgtgttcactttgctttcatacacaaacctcaattttacttcttgtccactaagtcagaggctatattctatttggcagtgtttttcaaccgtaagtcacacagtcatgaaatagatctagtggaacataaccagcactcatttttcctaacagaaacaaaaaataaaatagggttattgttggtgaagctttcatttcagccacaaatgtttaataaaaatgcatgtgctggggtactatggaaaataccttccctattgtatctactctcaacccagcaggcagaagtaatcctggaaaaatgtgagtcacatcatgtcactataccaacagcttcccattctcactcagagcaatggcctgtgtgatggcctatagggtccttcagaattaaccagcatctctctccaaccttcagctaaccgctctgccaccgcaggggctttaaccagcatctctctccaaccttcagctaagtgctgtgccacctccctccagcgttcaggggctttaaccagcatctctctccaaccttcagctaaccgctctgccacctccctccagcgttcaggtcagccccatttcagggcccttgtgcttgcctcacctaacctctgcatgattcactcattcacctgagttcctcggtccactgtcaccctatttttaatgaaaccccacccccttacacactccttattttatcctctttccctgttctagtttccacacagcactctacactttctattaattcttctctcccctaccctaactacaaagcaagctctataagaacaagggtttttgtttatttactgatatagccccaggacctgtgacagtctctggcagtaaatatttgcccaagaaatgaattacttaaaaatatgtatcactttaggaaaaagccatgttattggcaatgaaacacaacaattcttaagtttggaacacaagaaatttgggtaggaattttgatggttgaggataagctacaattcagacgccagaccgtaaattccacctatcgcaatattgagtaagttgctggcatactctaaatgtgcaagtctactgaaatgaccttcgttcacatcaaaagtaatgtaaagaatgtgtgtatctcagccatcattttaaaagaagagaagaaaaaaacttacgggcgaagctgttccctaaacagctaaaatatgtaaaatgtaaaagacgggccgggcacggtggctctgtctgtgatcccagcacttgggaggtcgaggcaggcagatcacctgaggtcagaaattcgacaccagcctggccaacatggagaaaccccatctctactaaaaatacaaaaattagctgggcgctggccaggtgtggtggctcacacctgtaatcccagcactttgggaggctg[133 bp omitted]gaggcaggggaatctcgaacccaggaggcagaggttgcagtgagccgagattgcaccactgcactccagcctgggtgacacagtgagactccgtctcaaaaaaaaaaagtaaaagacttacaccttttgcctaattcgcagtcaaagtctcactcttagtaaccacaagttgtacacgttcacagttttcactattcccttcaaccctgaatgaagaccagggggcttatcactgatcaccttcatttcctcagaagaaaacaaagactggcattcaggagaaaatcacatagcaggtcttgaattgtggcacgtgaatggcagaacatgtcagttataatttccatggttttttttttttgacagggtctcactctgttgcccaggctggagtgcaatggcatgatcatggctcactgcagcctaggctcctaggctcaagccatccacctgctttggccttctaaagtgctgggattacaggcataagccaccatgcaaggtacatttccattatatttttctagcacattttgtaattcactgaatgaaaaaaaaaaatctttgggaaaaagtcattgaacacttctccctcataaacaaaaaaacacatggcaaaatcagatttctactgtgtacaaaagtttatccaactgtaaaaaatagtatctctaagcctgcttttctatatttcatgccattaataaaacacaagacttgataaaaccattttactcatcacttcttagagagtaaattttaatattagtcacttgtaactggttttaacccatcttctcaaaaacaatgtggttttacctgtttgtttgtttgtttttgagagggagtctctgtcgcccaagctggagtgcagtggcacaatctcagctcactgcaacttctgcctccccagttcaaacggattctcctgcctcagcctcccgagtagctaggattacaggcgcccaccaacacgccgggctaatttttgtatttttagtagagacagctttcaccatgttggccaggctggtctcaaactcctgacctcaactgatccacccgcctcagcatcccaaagtgctgggattacaggtggttttacctgtttttactgttaagtaaaagttttttttaaaagaggaaataaatgagacaagttgaaagagcaactcacagacataaatatataaaattgaatgaagtactgaagccactggcaaaatgaaaaccccatcatatataggaagtagtcaacctgatactgatgaaaacaaacatgatatcaaacaaaatctcaagaaaatcacatcgagcacagcagaaaagaacaaaggaagcatttagaaaagtaatgaaatggaagacaggaaatgaagataaacaatcataaaactgatgtttcttgagtaaagaaaaataaaaatgaatgcatattaaaaggtgtataagaaaatattcctgaatctgcagtttgaatggcttaccatttaacaggaaaatgtaagagaatcacaccaagaccgagttatatcctgatgaagttactgaacttcaaggataaagaaagaattctagcaatactcaggcagaagtaggtcacctacaaagggaaaaaaacagtcaggctggccccagacttctctagagtaaccctagatgccagaagataatggaatagtgtctgctgggtattaagagaaagggaaacgtaacccaaaaattctgtaaccagccaaaacatcacgttgcttgtgaaagccactaacagacatttttgaacataagagcactcaaacaaccactcctgaaaaaactatttgataaacataatagatttaaatatattaaagctatagctttataatacccatagaactacaaactaccatgtttaatctattctaagatgtacctttttcacatttttgtctatctgaaatcagcatgcatatttcaatcaatggtacgtcatagtttctttgacagcatttaactgtattaatggtatacaaaataacgaagcacacaaccaccaacggtatcttagacataacgaaatacagtatataacttacaaaatgagacagaagggatagcaaataaagaaaacaaaccatgtagtttaaaggaagaaaaccaagccagacactgtagctctcacctataatcccagcactttgggaggccaaggcgggaggatcacttgaggtcaggagttcgagaccagcctggccaacatggtgaaatcccatctctactaaaaatacaaaaattagccgggcatggtggcaggcgcctgtaattccagctactcgggaggctgaggcaggagaatcgcttgaacccgggaggtggaggttgcagtgagcccgagatcatgccactgcactccagcctgggcgacagagctagactgtctcaaaaagaaaagaaaagaaagaaaaccaaaagcaaacatatagatgacaacaaaacaaatacactaatattatataagcaaagcaaaatatataacattaatgtaaatgattaaaagcatctcaaattgagtcaagactaacctttatccaactacaagggtctacaagagacaaatctaaaatagagactttgagaagttaaagtaaaaggttagataaaagcatacatagcaagcatcaacaccctttcaaaaccagctgaattcaaactgaaagaatattaaaggaggcagaaaagggtcattttttataatgatcaagattacaatctataaagatatgttataaaactatatataccaaaattttcataatatatagttacaacaaaaacttttttttttgagacagggtcttgctctgttgcccaggctcaagtacaatggtgcaaggctcactgcaacctccacctcccaggttcaagtgattctcctgcctcagcctccaaagtagctgggattacaggcatgcaccaccacacccagctaatttttgtatttttagtagaggggaggtttcatcattttggccaggctgggattacatgtgagccaccgcacccagccagaacaaaaatttcaaagaaatctaagaaaaacttttaggcagaagtaagaatataagagtatcatttcctgaaagatcaaatacataaacgacaaaatggctgaacatgtgaaagaatgagatcaagtctctatgcaacagttataaaaactgatcatcaatttaggccattaacacctcaaaaatttcaggaaagtagaaatagtctatacaatctgacaatgaaacaattaagctactccccttaatgcagtagacttgacatttatgtactctctctccttaaattacttcaagtaattgaatggagtaatgtaaatcaaaatcaatagagattacctagaaaataacaatgataaaaactgcccatataaaaatctctggtacgactgggcctagcggctcacacaataaaaaaagttagccgggcatcctggcgcgtgcctgaagtcctagctatttgagaggttgaggtgggaggatcccttgagcccaggaggtcaaggatgcaatgagtcgtgttcatgccactacactctaatctgtgtaaaaaaaaaaaa[135 bp omitted]acacggtgaaaccctgactctactaaaaatacaaatgttagccaggtgcggtggcgcatgcctgtaatcccagctactcggaaggctgaggcaggaggatcacttgaacccgggaggtggaggttgcaatgagctgaaatcacgccactgcactccagcctgggcaacaagagcgaaactcggtctcaaaaaaaaaaaaagaaaagaaaaaataaaaagaagagaaaaaaatctttggtacactaataaagctatactcagaggaagagagccacagcctaaacaccttcaactgagcaagaattaaatgagcattcaactcaaggttagaaaataaacatttaaaaataagaacaagggaattcaaagttactcaagtaagataacagaagcctgcagaattaattctaaaacctaggagcagccaggaacggtggctcatgcctgtaattccagcactttgggaggctgaggcggttggatcacgaggtcaggagatcaagaccatcctggctaacatggtgaaaacccatctctactaaaaatacaaaaaattagccaggcatgctggcacgtgcctgtagtcccagctactggggaggctgaggcaggagaactgcttgaacctgggaggcagaggttgcagtgagctcagatcgcgctactgcactgcagcctaggcgacagagcgagactccatctcaaaaaaaaaaaaacgaaaacaacttaggcgctatattttgatgggaggggaaaaaaaacagacaaactattagctggactaaaaaaacaattatatgaaattagggactgaaaaggaagtaagataatagagaagaaataaaaataagtataaaatatgtttccagtaaatcctaagctgctaaattttaaacacagatacaatggatgattttctgggaaaatataaattgtcaaaagcatctaacagaattagaaaacactccaataacttccgaagattcgcataagttacacagttagctcccccctcaactccaaataccagtcccagacattttcatagtaagtaaaggtaatttcaaaggtaattcttttattaaactatcctatgaaacagaaaagcttcccaattcatttcctaagccaactgtgtatagacagcagagtatactcaataaaaattctaaattataatagcaaactctgtattatatttatctcagacactggtctagctaggcagtatgcatgcttcaactcatttactctcaaaacaatttgatgatctggagtgagagtcaaaatatttaacagcaggtatagaatagatgccgatcaatcagaaaaaatgccagagctaggctctgctgcagcaccatcctctttgtgccaaacataattatcccttcagcggctagataaccaaggaaggggcaagtatcttaacgacctgtacaatgacggtgctagtgcctactgaccgagcactactccctgctcaggggaaatgtctgggactggtaccgctcgggagtagttctcagtcagtcacaataccatagtaatggtattatccacctctattttacaggtattctttccttttaatatcaggaatgtatattacattttatgaaaatttttcaacaacagtaacaacgaacgctttttcttttcgacattaacatcatgttagatcaagagattaaacctgagtttgtggaagattgacaccttttaagtttcttcttgggttatatttactattattttattttagaaaggccacatagcatagaggttaagtgcctaattgctggagcctcaatgtgtgggttcagacccaagcgcttctctattttttttttttgagacggaatttcactcttgttgcccaggctggagtgcagtggtgcgatcttggctccctgcaaccttcgactcccggcttcaagcaattctcctgcctcagcctcccaagtagctgggattacaggcacccacgaccacgatcggctaattttttgtatttagtagagacggggtttcagcatg[140 bp omitted]ttcgagaccagcctgaccaacatggaaaaaccatgcctctattaaaaatacaaaattaggcaggtggtggcacatgcctgtaatgccagctactcgggaggctgaggccacagaatcacttgaacccgggaggtggaggttgcggtgagccgagatcatgccattgcgctccagcctgggcaacaagagcaaaactgcatctcaaaaaaaaaaaaagtcaaagccaaattttcctaaaataacaataaaacgtattccttctctcttttcctttttcttttcttttccttcttttgatggagtctcacttctctcagcctggggctgcacgggctggagtgcagtggtgcagtcatagctcactgcagccctggctgtgggctcaagctatcctctcacctcagcttcctgattagctgggaacacaggtgcatatggctttttttaactgtttgtagagacagggtctcccctatgttgcccaggctggtctcaaattcctgggctcaagtgatcctcctaccttggcctcccaaaatgttggggtaacaggcatgagctaccatgcccaacctaataaaacttatttatatcccctctttcatccttgcatcctccgtcttgccctaaactgatactgaggttctgatgttcttagagaacatagctactgaattttcaaaataggaatatacttaaatccagtgagagtttgagtagattttccaagcatctcccggttccaactctccttctaatgttcccactttatctgcactaactttacaactggtcctaaaactacaattacatgttgagggagggacctcatgggctgtgattagatcatgggggcattcacccatgctgttctcgtgatagtgagttctcacgagatctgatggttttataaggtgcttttccccgcttcgcactgcacttctctctcctgccgccatgttgaagaaggatgtttgcttccctttctgccatgattgtaagtttccagaggcctccccagccatgcagaactgtgaattaaacctctttcctttataaattatccagtctcgggcagttctttatagtagcatgagaacaaactaatacccaacatactatttttttttattttttcttaaatagagatggggtctcacaatgttgaccaggctggtcttgaactcctggtctcaagtgaccctcccatttcggccttccacacccggccccttaattcacgtatttaaaaaaaaaaaaaaaaaacaaaaccttcaaaaccataacatgaatataacaaaattacaatgtttctgattagaactatgaaaatcttgtctttccagggtgagttttaagttgatattctgtgtgagtagcacctttggtgcccagtgtctttacaaaaaaaaaaaaaaaaaaagatggcataactagaaattactgactgagccatctggctcaaatgaaaagccagtattttcagagtattagtcacacactgaaagaagctggtcatgcaaatcacattgtaactttataaatattacaaacttaacaatttcagtcaacgcttactgggtactatgttctgtaatcatccctttataaagtattaaacttaatactcacaaaaatcatgagataagtatgaaaatgttccccattttacccagacatatcgtctaacctgaatctctgccgatgtatttacttctctaccttctctcatgttactctggatcaactgcccttgctcctaataaggcttccaaactggccagtaattagatctgatctcattcttcccactcagatgtcctcaaagacactgctccagaaattcctaccctctcctgtgtcatcggttcttctctctactaaattcaatcccatcagcatcaagcatgccactagcaattctccaactttacacacacacgcatgcagacacatacacaaatgaagcccacaagccctccagttactgcaccatttctcaacaccccttcacggtacaactttaagagttgtcttcattccttatctccacttgctgctctccttccattctctcaggctcataccaatccgtccagtgcaactgcctttctcaaagtaccattcacctctagtggtcactcatcagtccttatcttacccaaactcttttttgacacagctgatctctcttcccttgaagctttcttcacttggcttaaaggccacagcattctggtttgcctcctctgacacctcactgacgccgctcacactccttcactagcttctggttacttatctggcttcttaatgccagtgtgtcccaagacttagtcctcaatcttcttcacctatctacagttactcccttattgagcccatccaacttcatagtttatatgcaatccatatgctaacaatttcccactttatatctctaagctaaacctcctcactgaattccagatcaaatatagtaagctgcctatgtgacttctctacttcagtgtctaatagacaaatcaaaagtagcatattcaaaaccaagcccctgattatctctccttgtcctgcgtctttcttttccatttcagttaatgtcaactccatcctttcagatgttcaggccaaaaaccctgaaatcatccttgacacattctctcacacactctacccttcaaatattgtgttccttctaggccaggcgcagtagctcatacctgtaatcccagcattttaggaggccaggctggacaacaaagtgagaccccatttctacaaaaaatgttaaacattagtcaggcgcagtggtgcatgcctatggtcccagctactggggaagctgaggcttgagcccaggggttcgaggctgtggtgagccatgtttgtgccactgaactcctgctgggcaacaaatcgagatcctgcctcaaagaaaaagaaaagaattctattccaccagcaaattccaacagctctatttaggaaatacacccaagaattaaaccactttgttctcggctccaatacaggtccaagctagcatcatgtctcatctgactctccgtgcagtctatattctcagcatagcaagccaagaatgatctcattaaaatgtaaatcaggtcatatcactccagtgctgaaaaacctcacgggtacctcactctgagtaaaagcctaaatccttacctgtaaaaaatcacacagcctcccctccacaccctttgctgctcctctgacattgccaggcctctctcccactgcagcgcccctgtactgttcttctcttggcctggaaagctcttcaagacatcagtactccaccctcaacttttcattccctttccccgctttattttctctccagggcacttatcactacctaatacaccacatttttaatttaattatctagtttaccatctgtcttcccacaataactgcaaaactttgtaccagcaaaactttcatgtcctgttctttaatgtactgctatgtttacaaaagtaggcactcaaatatttgttaaatgtagaattcaatttgaagattatgtgtgatctgccagcactttaaattcaaagtaccaacataaggtaatttttacatgatcctatggct[134 bp omitted]gcagaagaattgctttaacccaggaggcggaggttgcagtgagccaaaatcatgacactggactccagcctggatgaaaagagtgagactccatctcaaaaaaaaattttatgtccaagccctcttttcatatatatgaaggttggtttgggtggcatttcactatactcttcttcaaaccttttttctttttttttttgagacggagtctcgctctgtcgcccaggctggagtgtggtggcgcaatctcggctcactgcaagctccgcctcctgggttcacgccattctcctgcctcagccttctgagtagctgggactactggcgcccaccaccacgcccggctaattttttgtactttaattagacacagggtttcacttg[137 bp omitted]gatttctcctcagttgcaacagatacaaactctggagactaaagctctggggatgtttctggaaaaaaatagcaatgactattagccaaaagacaaaaacaggcaaacaaatacaatggtactccaacaggcttctaaaacagcactaagtccttcatttattgaaggaggagccaaggttattctcaatcaatcgtaaagcaagttcataggaggaataaattgcataccaagaaaaaaagcaatcaagagttaagtacttagagctgttaacactgagtgttatacaaagtaagtct[134 bp omitted]aaccccgtctctactaaaactacaaaaaattagctgggtgtggtgatgggggcctgtagtgccagctactcgggaggctgaggcaggagaatctcttgaacccgggaggcggaggctgcaatgagccgagattgcgccactgcactccagcctggacgacaagagtgaaacgccatatgaagaaagctctcaaaaaaaaaaaaggaaaggaaaaagctctcagccaggtgcggtgactcacacctgtaatcctagcactttgggaggctgaggccagaggtttgagaccggcctgggcaacacaatgagaaacccccatctctacaaaaaataaacataaaacttagctgggtgtggtggtgtaccatgtggtggtatagtcctagctacatgggaggctgagacaggaggatcacttgagcccaggggtttgaggctgcagtgagctatcactgtgccacctcattgcagcctgggctacagagactctgtccctaaatatataaaaaataaataaaaaataaaagggatgagagttaaggtattaaaaaataagtattttacctgccttcagaaatttcccacaattcaaaattcaaaaatgtttatgtggctaagaaatgaagaatcaaacttcaaattacaaacagaattactgaaaattttaaatgagctttgcaaatacattaattcagaactaaaagtctgatatgatgtcacattaaagcaagaagcccagaagggacaagcagagtgacagcaccaaatgggcagccagaaatacaaggaagtccaagcccctcatgagcaacttagttttcatgacttttttccaacttttattttagattcagggggttattactttgtttgaggggaaaaggtgtcaacaacttttctctgcaatgtttagccaaaggtaatctaataaataatcaaataatctttcccacacaagcctcgagcagattctaatggcctgaaaagtacaaatgatgctcaatttgaattttaaacaatattgttccactttcattctataaagaaaatgaaaatataatttactctgaaaggcacttttaaaaattcaattcctggcttatttccagtaacttacaaatattccctatacataactttcattgatccctttaaaactttaaaaatcacacatacagtaaataaaccttcggtaacactataaaaacaattactattacttctagcaattacttatcaaggcaaataaacagctactgaatttaccattgaactttctttagtcatagtaacgagagatatctggtactccattgcatttactgaaaaaatgtttacagacttaagacttgtttactcttctaatagtcacctactacacaattctcatcttacaagggaaggtctcttgttgatcttcagagcatgaaatcagagacagctttagtatgtagatccccaagtaaaaatagaacagattccagggactcaaaatgagaaggcggaggaagaacaactcttatttaagaaaacaacctacagttctattcaaaatcataaaatggatgattatatttcatataatttggataccaagtgttgaataattcaagattgcacttttagaattcattttaccttgggattactaataggattctagcatctgctattgatattgcaacaatataggattcagaattgctaaacaacttcctctttataaaaatgactaaccttaaaatacagtctgatttacaaccagtaatctgaagaccaattttaactcatactttctaccttctgaaagccttttacactaattaaataaacatcaaatgttagtactaaccaacaataaccatgaatgcctcactcagactaaaagcctaaatccttacctgtaaaaaccacacagactcccctccacaccctttgttgctccttatccagacttataccgaaataatcctaaatatgtattagatagctaatacacttgttttgtatggtccttcac[136 bp omitted]tctgcctcctgggttcaagcgattcttcttgcctc[200 bp omitted]gaagtcaagaaaggaagacagaggaaacttaaactctgtgattcattcaaaatatatttgctgagtatctatatatgcccagtattgtgttatgtgctagtgatataatgtagcacaggatcagacgcggtggctcatgcctgtaatcccagcactttgggagaccaag[132 bp omitted]gaggcaggaggatcgcttgagcccaggaggcggaggttgcagtgagccaagatcatgccactgcactccagccctgggcaacagagttactccagctcaaaaaaataataataaatgtaccacaggttgagtatcccttatctaaaatgcttgggaccaaaaacattctggatttcagattttggaatatttgcatacacataatgagacatcctggaaatgtaacccaagtctattaaacacaaaatttatttatgtttcattcacaggcacatcttgttttaatgcacttcagttactgtgtttttaacaaattgaaggttcatcaagcaagtctatcagtgccatttttccaacatcatgtgctcacttgatgtctctgtgtcatatttcggtaattctcacagtatttcttcttttttttttttttttttttttggacatagagtctcgctctgtcacccagactggagtgcagtggcacaatctcagctcactgcaacctccacctcctaggtttgagagattctcatgcctcagcctcccaaatagctgcaactacaggcaaatgccaccatgtctggctaatttttgtattcttttagtagatacaggttttcaccacgtggaccaggctggtctcaaactcctgacctcaagtgatccacccatctcagcctcccaaagtgacaggataaaggcgtgagccaccgcgcctggccagtttttttcattattactatatttgttatggtgatctgtgatcagtgatctttggtttttctattataattgttttggggcaccacgaattgtgcccatatgagaaagcaagcttaataaacgttgtgtgtgttctgactgctccaccaactgccagttcctgtctgtctccctgattctcaggactcccaattatcctgagacacaacaatactgaaattaagtcaaataataaccctagaatggcctctaaatgttcaagtggtctcactttaaatcaaacgctagaaacgattaagattagtggacacctggccaagaaattttaaaagttagccaggcgcaatggcgtgcacctgtagtcccaactacttgggaggctgaggcaggaggatcacctaagcccaggaggctgaggctgcagtgagctataaccacaccactgcactccag[224 bp omitted]gaggc[138 bp omitted]ctcatgcctgtaatcccagcactttgggaggctgaagtgggtagatcatgagatcagcagttcaagaccagcctggccaacatggtgacaccccaccactactaaaatacaaaaattaactaggcatggtggcatgtgcctataattccaggtactcaggaggctgaggcacaagaatcacttgaacctgggaggcagaggttgcagtcagctgagattatgccactgcactccagcctgggagacacaacaagactccgtctcaaaaaaataaaaataaaaataaaaattaattaattaataataatagggccgggcacggtcgctcacacctgtaatcccagcactttgggaggccaaggcaggcagatcacgaggtcaagagttcaagaccagcctggccaacatggtgaaacccagtctctactaagaatacaaaaattaggctgggcgaggtggctcacgcctgtaatctcagcactttgggaggccgaggtgggcagatcacgaggtcaggagtttgaaaacagcctgaccaacatggtgaaaccctgtctctactaaaatacaaaaattagccagatgtcgtggcgcatgcgtgtagtcccagctactcaggatgctgaggcaggagaattgcttgaacccgggaggcagaggttgcagtgagccaaatttgcaccactgcactccagcctaggactaccatgagaatggtgtgacaccatatatgtttttctttaaggatggtttagagatggaaaaatgttaacaaatttggcaattactttggatcacctgccgtcataactggctgctgcttgtcattcacacaacaccagaacttaaaacaaatggaactgatgtcatcttgaactcttcatttattttgatttggaatggaggcattgtttttaaaaaaaaaacacgtcacatagttgtctaaaaataaaatacatttaattggccaggcgctgtggctcacgcctgtaatcccagcagcttgggaggcc[134 bp omitted]gaggcagaagaatggcatgaacccgggaggcggagcttgcagtgagccgagattgcgccactacactccagtctcggcgacagagcgagattccgtctcaaaaaaaaaaaaaattacatttaacctcaaattaaataaataaaaggacactgtaatataacatcttcacaatacccaaaatgagtttcaaaggcctgttacttatagcatacctattcaaagtgggagagaggggacctcaccatcttgctcaggctggtctcaaaactcctggactcaagcaatcctcctgcctcggcctcccaaaatgttgggattacagaagttaagtcactgcacccagcgcttaaaactttttcagaatcttcttatatacaaatgagcaaatttctatcttacatattatggctaatgtaactaacttagaacattgttggccaggcgtggtaactcacacctgtattcccagcactttgggaggctgagaagggtggatcacctgaggtcaggagtttaggaccagcctggccaacatggtgaaacctcgtctctaccaaaaatacaaaaattagctgagcatggtggtgcgcctgtaatcccagctactcaggtggctgaggtgggagaattgcttgaacctgggaggcagaggctgcagtaagctgagattgtgccactgcactccagcctgggcaacagagcaagaccctgtctcaaaaaaaacaaaaaagaacactgtcaaggcagttaaaactaagtatcaccttgaacatttcaaaataaataataaagaattcagagaacatctggctctgaacagtgtcagtctccaaattaaactaattgtaaaaatgtgcacccagcaacttagacgtaattatttaggttataatttatctatttaaatcactcttagatgatgcagctatatcattttcctgataatgatgtcttcgccattccaacagagaaaatgtttgaatccagctcatttaaaaatagtatgaggctggacgtgttggctcacgtctgtaatcccagcactttgggaggccgaggagggcagatcacgaggtcaggaggtcgagaccatcctggctaacatggtgaaaccccgcctctactaaaaatacaaaaaaactagccgggcatggtggcaggcgcctgtagtcccagctactcgggaggctgaggcaggagaatggcgtgaactcgggaggcagagcttgcagtgacccgagatctcaccactgcactccagcctgggcgacagagcaagacttcgtcaaaaaaaaaaaaaaaaaatttagccaggtgtagtggtgcgtgcctgtaatcccagctactcgggactctgagacaggagaatcacctctgcccaggaggcagaggttgcagtgagcctggctgacagagggagactgtctcacgggggctggggggtgggggaaaggttaaaaataagagaaactgaatgcagggtatgtaagaactcactgtactattctcacagttcttctgtgtatctgaaactcttctaaaaaggtttatttaaaaacaaaaatcctatcacagtcatattgcttccccaatagccatgccatatggcttagaggctgaagagggtagcaggcaacacaataccctcgtctgtgccactgctgcacctgcaagagttaaatataaaccaaactggataacgagaattttgttgtatccatttggcaaatgctcagggcagaagaagagcaaaggtgtcatcctaagggagagatgtagaaataaccagagaagatagcaaaaatacagtattttcctaggggaactatcataccataaatgttcacagcagtctgaaaatcagaaattattctgagctttgtcagtgccaagtaaaagaagaaaaaagaatgaacagaaaaaagaaattagcacagcctaaagtactaatgaggataatataaaccttacgcactgctaaatacaaaaaaatagggaaatacaatcctctgtttacctagggtgaaagagtatcaaggaagacctcggaataacactcctctctctatataaaccttaaataagtaatttagttttagaatcctaaagcccaaaagatggcaaacagactcaaaataccagatgcggccatcaccaatagttattagttccccttccaaaagttacaaagacttcagagtttaacagacagtgtgcagtggtataaaatgcggtggtcttggccaggtgcagtggctcacgcctgcaatcccagcacttcgaaaggctgaggcgggtgaggtgaggagttagagaccagcctggccaacatggtgaaactccgtcttttaaatatatttgacacatcctcaaaaaaagtgacaaaatcaaaggatcatatgaccccacaggctccccaggacctaagtagaaaagggatcatcgtatcaacattaattttatattcattctctatgtagatctaatttaaacattgtttttctaagagggggtcttgctgtgtcaaccaggctggagggcagtgatgcactcatg[134 bp omitted]ctagctgtcttggttctgctattgcaaataagtgaaacttagtattctcttttggaaactacggtcagaaagctgggtaggaaatttaaggctgctagggcagaggaccagacaggaacttcagagatgtgggaggaaaagccaagaagaaaacaatgttaatttttgtagtaattttttaaattatacagaaaagctatagtcatgacagagttgttcattaaagaaaatacttcaggggtgggcgtggtggctgtattatagataatacagctagatcattttcctgataatgacattttcaccattcctacagagaaaatgtttgaa[135 bp omitted]accccgtctctactaaaatacaaaaatcagccgggtgtggccggg[175 bp omitted]gaggcaggagaattgcttgaacccaggaggcggaggctgcggtgagccgagatcacgccactgcactccagcctgggcgacagagtgagactccatctcgaaaacaacaacaacaacaacaaaaactttgaaagaaaaataaggaccttgatgagacactgaaggtgtctcaacaagtgtcacttgcttaaacaagtaaatggaaaagaaaaatatgtaagaagggggaagaatgtgtataatattgtggtgaagtagctatattgtattaccaactaatataaactagtgtcgatcaacgaaaccccatatatatatagagtttcgttgatatatatatatatacacacacacacacacacacacatataatgtcacaccccagcatttttttttttttagacagagtcttgttctgtcaccaggctggagtgtagtggcgatcttggctcactgcaacctcggttcaagaggttcttgaacacctgggttcaagcgattctcttgcctcagcctcccgagtagctggcactacaggcacgtgccacc[231 bp omitted]cctctgccttctgggttcaagagattctcctgccttggcctcccaaagtgctgggattacaggtgtgagtcactgcacctggcctaccccagcatttttaaggtcttccacaaacgtcaacctttccagatagttttcccactagttcagtttatcatatactccaactacacaacttctttcagcataaactttgtcttgcttgttcttttccctcagccttaaatattttcctttttctgtgtgtcaaatttgacagatcttttaaaggtcaagcacaagtgccatgaactcctcctcaaagccctccatgaaccagactggtagaagccagcttctcttgactttttctgtaataacaaccctaaagcagctgtattatggaacttttatttttctacagactacaagttcctgaaacaccaaaacagcatcccaatagtacacaaaatgggcatcaaacttgctgatttaagagacagcattagatctgcataaatgagcttcactccacagatcaaagaaccctccgaaattacataccaaattatgcatgtgtgcttttctcaggaggtcttttaactcttgctagattctcaaaggaaactaagaactcccaaaagaaaaaaaataaactctgagaaggctgagaaggaaagggctcgagttttatcagaaaataaaactgtttctactagccagctccatcagcatttaggagggttagattggagaaattacccaatttctttattttcttcaaatatttggctggggcaaagatttgacacatggttcaaggtgggaggattgcttgaacccagtagttcaagaccagcctgggcaacgtggcaaaaccctgtctctaccaaaaaaaaattttttttaatttgctgagcatggtggcgcgtgcctgtagtcccagctacggaggcagataaggtgggaggttcacttgggtctgggagattgaggctgcagtaggccatcatcacatccctgcactccagcctgggtgacagagcaagactttatcaaaaggaaaaattagccaggtgtggtggtgcatgcctatagtcccagctatagggagggagggaggaggattgcttgagccgaggaagtggagggtgcagcgggccttgatgttgccactgcactctagtccggacaacagagcaagaccctgtctcaaaacaaaacaaagatttgatgtgatttgcctcacaagcaactgggactacaggcatgtgcaaccacgaccagctaatttttgtattcttagtagaaatggggtttcaccatgttggccatggcttatctcaaactcctgacctcaggtgatccacctgcctcggcctcccaaagttctgggattacaggcgtgagtcactctgggattacaggcatgagtcactaagcccggcctgccaga[133 bp omitted]caacatttctactaaaaatacaaaaattagccggttgtggtggcacacgcctgtagtcccagctacttctgaggctgaggcgggagaatcgcttgaacctgggaggccgaggttgcggtgggctgagatcgtgccactacactccagcctgggcaacaagagtgaaactccatctcaaaaaaaaaaaagaaaaaaaaaattcatttactactggctgctctgcctatggagtagccattctttttttttttttctgagacggaatttcttgttccccaggctggagtgcagtggcatgatctcagctcgctgcaacctccacctcgcgggttcaagcgattctcccgcctcagcctcctgagtagctgggattacaggtgtgcaccaccacacccagctaattttgtatttctagtagagatggggtttctccatgttggtcaggctggtctcaaactcccaacctcaggtgatccgcccgcctcggcctcccaaagtactgggattacagacgagagccactgcacctggcagagtagccagtctttattcctttactttcttaataaacttgtttcactttaaaaaaaaaaaaaaaaaaaaaaaaggccaggcacggtggcttacgcctgtaatcccagcactttgggaggctgaagcgggcagatcacctgaggtcaggagttcgagaacagcctgaccaacgtggagaaaccccgtctctactaaaaaatacaaaaaactagctgtgcctggtggcacacgcctgtaaccccagctactcgggaggctgaggcaggagaatcgcttgaacccaggaggcagaggttgcagtgagccgagatggtgctactgcacttcagcctgggcgacaagagcgaaactgtctcaaaaaaaaaattaaataaataaataaataaaaaacgttgtttacatagtgctactaaatgtagcacctcaaggtagggatatcacatcaattacctttgcgttcccgcagcatctcaatacaacggcatataagggctcaataaataaacttttatgctgatcctttattccattttccaagcaaccacacaagtttaaatgaagactgctatttaaaattaggatggtagctgtgcgtggtggctcatgcctgtaatcccagcactctgggaggccaagccaagaggattgcttgagtccaggagttcaagaccagcctgagcaacacagcaagactttgtctcaaaaataataacaaaaaaataaaattaagacggaatttctgtcttaaactacaggtttctctatttcaacttcctgttccttgaacatgttaatagagcaaccatgtagttgtatttataactacaaatattaagttctttatttgaaaaaggattgataataatgcatggttacaggtgactttttttaaaaacttcttattctgaaatacagtcccataggacaagggggaactgtacagaaaggtttcctgtaacctttacccagtttctcccaaatgctaacaccctgtataactctagcacaatatcaaacccaagaaatcgacagtggtgcaatccatatactttatagtccccccacccctgccccatcggcattttcaattacttgtggtcaagcccagtctgaaaatattaaatggaaaataacagaaaaaataaacaattcctaagttgtaaattttgtgttgttctaagtagcatgatgaaatctcacactgtccctcctgcctatcacttagcagtgcctggtttcaagtaacccttattttacttaataatggccccagagtgcaagagtagtaatgccggcatattgttatcattgctctgtgttattattgttgttagactaacataaattaaatcctatcataggtatgcatatataggagaaagcacaaggttcaggactatcagtggtttcaggcatcccctggaggtcttggaaagtatttatcccatgcagataagggaggactactgtattcagatgtcatcactcggttgtgtgtgtgtgtgtgtggggggggggggtgggtgtataactctatgcaattttatcacatttgcagatgtgtgtaatcactatcaagatacaagactgttcatcaccacaaagatccctcatgttactgtataccacatatccctcatgtccctaaatccctgaacaccactattctccatcactgtaattctgtcatttcaagaattttatacaaaggtgccaagaccacccataaagaaggacaatctagccaagatcccaccactgcactccagcctgggcaacaagagcggaactctgtctcaaaaaaaacaaaaaaaatagactggatgtggtggctcacacctgtaatcccaacattctgggaggccaagacaggaggactgcttgagcccaggagttcaaaaccagcctgggcaacacagcaagaccccatctctatttttataaaaaatttttaaaagatatatgtagacacaaagagagagagaccctgtctcttaaaaaagaaaaaaaaaagcaagctgttttctatctatagtggatatacaattatacattcccaccagcaatgtataaaagttcaagtttctccaagtccctggcagcatttagtgttacagtttttttaattttaactattctaacaggtaagtagtgatatcttacggtgatttcaatttgcatttccctgatgtctaataatgttgaacatgttgtcacttgtttgctatttgtatgtcctcttcagtgaaatgtttcttggtgtcttttgcccttattttttaggcagggccttgctctgtggcccaggctggagtgtagcggtggtgaagtcacagctcactgccgcctcaaaatccccatctcaagcgatgctcctattcaagcctccctagtagctgaaactacagatgagagccaccacacctgtctaattttgcccatttttttgaattgactttttttttttaaactgttgagggttctttaaatattctagatacaatcagttgccagatatgtgatttgcaaatgttcttccagtttgtagcttgtctttgcatcctcttaacagtctttaatcaggtaaaaattcttaattttcatgatgtccagtttactaatatttcctt[136 bp omitted]tatagagaaaccctgtctctattaaaaatacaaaattagctgggtgtggtggcccatgcctgtaatctcagctactcgggaggctgcagtgggagaatcgcttgaacccaggtggcaagaagttgcggtgagccgagatcgtgccactgcacttaagcctgggcaacaagagcgaaactccatctcaaaaaaataaaattaaaaaaaaaaaaggaaaaagaactctttgcctagcattactctgtcttaacatagaaaccctagaaaatatataccttacataagaatatgataatgtaattaaaatgcatgtacattcaaaagcaaaggaaaagtgtctcctgacataaagaacttttttaaaaattcctatttgataaaaggaaaagtgtctcctgacataaagaacttttttaaaaattcctatttgataaacttacttaaaagcagtcttgttttacaagattaaagcaaacaaacaacaaacagctgccaggtaaaaatttaaggtctttgttttttgtatttttaacatatccctagccaatagaagagtaaataagaatagctaaaggaaaaaaagcaaagatacagcaatagcagtttttctaagtcactggacatgggtataaaggttaaataaaaggtaaaataaaatatttccgcttacaaaaattaacttgttgcaaatctagaacataactttataaaaagaggtatacatctctacagcaacagcaatacagtacagtatttcttccagaagtttctatgagggccagaatctatcaatggaacagcactgataaaaacttctgattagaccgggcgcgatggctcacgcctgtaatcccaacactttgggaggccaaggcaggccaaggagaccatcctggccaacatggtgaaactccatctctactaaaaatacaaaaatgatccaggggtggtggcgtgtgcctgtagtcccagctactcagaaggctgaggcaggagaatcacttgaacccgggaggcagaggctgcagtgagccaagatctcgccactatactccagcctgggcgacagaacaaggctccatctcaaaaaaaaaaaaaaaacaaacaaaaaaaaactgctgattaactcaaattagcccaatactatcttgcactagggggaaaaagtttagaatgttttattgtaacatttaaatatcttatttcctgaaactacattttattctttatcatttatctgtttataccaataattcatattcattaccaaaatttggaaaatgtttgctttttctgatttgtacttttctgtacctgaaatgctattaaccatataaaactacactatgtttaccttgccagatttgtttccataagcccacacttccttctctgaaaagttatttcctacaaaccaatgaaaggtaacattagacacacccttagaggtcatctaaattctaacaaaaatttaaatctaaaaaaaaggtttcaataattaagaaatgccaaattatttatcctaaatcaaactgatctcattaaaagagtgcttaattaatactttacttgcttaaagcaaaggaatgcccacactgtaccctcctgccaacaaaaaaattgtactgaagtacccaagaccaaaagaggcgaaggattgaaactcatcttgacagtgcaatcaaacattcttcacctgagaaaaggaagtcaaaaggcaacaatataatgatagtcactggattatcagattttccaccctagatccactctattaaataatgataaatgcacctaatttcacaactatatatggaaatatca[136 bp omitted]catggagaaaccccatctctactaaaaatacaaaattagccaggtgtagtggcacatgcctgtaatcccagctactggggaggctgaggtaggagaatcacttgaacctggggaggcggaggttgtggtgagcctagatcatgccattgcactacagcctgggcaacaagagtgaagctccgtctcaaaaaatatacatctatgcaatagacgggctgggcgcagtggctcctgcctgtaaatcccaccactttggaaggccaaggtgggcagatcacctgaggtcaggagttcaagatcggcctggccaccacggcgaaaccctgtctcaactaaaactacaaaaattagctgggcgtggtggtggacacctgtaatctcagctacttgggaggctaaagcaggagaatcacttgaactcaggaggcggaggttgcagtgaaccaagatcgcaccactgcactccagactgggtgacagaacaagactctgtgttgggaaaaaaaaaatgcaatagaggccaggggtggtggctcacgccagtaatcccagcactttgggaggccaaggtgggcagatcacttgaggtcaggagttcaagaccagcctggccaacatggtgaaaccccatctctactaaaaatacaaaaattagctgggcatggtggccagcacctgtaagcccagctactacagagactgaggcaagataatcccttgaatccaggagggagagattgcagtgagctgagattataccactgcactccagcctgggtgacagagtgagactccgtctcaaaaaaataaaaataaaataaaataaatatataaagtactcagcacagtgcctggtacatgttagtcctcagtaaacgttagcctatataaacatacatacaagaacctctctgaaaagacacatttgtcagccaggcatgatggctcatgcctgtaattccagcactttcgtaagctgaggcgggtgaatcacctgagatcaggagttcaagaccagcctggccaacatggcaaaaaccctgtctctactaaaaatacaaaaaataagcctgggcatcgtggcacacacctgtaatcccagctacttgggaggctgaggcacaagaaacgcttgaacccgcgaggcggaggttgcacttagcggagatcgtgccactgcattccagcctgggccactgcaatccagcctgggcgacagagcaagactgtctcaaaaaaaaaaaaaaaaaaaaaagacatatttgtcaatgatgggttgcttccacaaaaagaacttatggccagggtgaaaagactatgtttttttgtactctttgcatttttaaccaatgcttataataccttttcaaaagataaaatgttttaaaagtatctcctgtgctgagggattttttagtgtttaacataaggcactgcaaaacttgaattgccaccgctcaatttgcaaaggagtaagtcatagtctaataatatccacagagaaatacacaacctatctgatttcatgaatctgttaggtgtctttatttgcttaacaattagccataatggtcttctctgaaacattttaactcagtaatcttcaatctgggatgattttgtccctcaggagacatttggcaatggagacatttatggttgtcacaactaagggagtatgctactggcatctagtgggtgaaggccacgaatgctgctgaacattctatctataatgcacagaataggccctacaacaatactcaacccaaaacgtcagtagcgccaagactgagacactccacaacccaaggaaccattttgttcaattctgaaagtaaccagattcttcattatgttatcaacaaaacatacccgatatattctaccaagtaattaatttaaatccttaaggattgacagactagaggttcaataaatgtagccattgttgttttaagtttttggaaattttatacaaaaattagcctggcgtggtagtacatgcctgtaatctcagctactgggggccgcagggggcagcagaatcgcttgaacctgggaggcggaggttgcagtgaactgagattatgtcactgcgctccagtctgggtgaaaggtggtggtggctcacacttgtaattccagcactttgggaggccgaggtgggtggatcacctgaagtcaggagttcgagaccagcctggccaacatggtgaaaccctgtctctactaaaaatacaaaaattggccagacacagtggagggcttctgtaatcccagcaactctgaggccgaggcaggagaatcacttgaacccagaggcagaagttgtcgtcagccaagatctcgccactgcaccccagtttgggcaacaaagtaaaactctgtctcaaaaataaaataaaacaaggcttttatttcactgtgtgtagttatcgaatctttccaataaatttgatatgtttacatttcaattaaaattcatttgccttgccctactactttgtacattttgagcatgttaattaacatgcttcaaattttaaaaaaaaattaaaaacaatcccattgtttctgatcaagaaggcaggaaaacttaaatctgcagctaagtaactttacaatgaggcctgaaaaaatacaaattaaattgttctctcctctatcttaaagtgtattttagtatgccccatcagaaagtcaatcattaagaaagagctttgggacgttttattaatatttgctatatacattgtcaaaaaaaagtgcaaaacggaaccagatgaccatcaaaatctagagctggttcacaaacggataggaaatcctttcacacattgctgctgctgacattgttatcttattttactttcttagtaatgcataacttctttcacaccttttaaatgtttatcttttccattatgtaagaattcagagaggccgggcccggtggctcacgtctgtaatcccagcactttgggaggctgagacgggcggatcacgaggtcaggagatcaagaccatcctggctaacacagtgaaaccccgtctctactgaaaatacaaaaaattagccgggcgtggtggcgggcgcctgtagtcccagctactcgggaagctcaggcaggggaatggcgtgaacccgggaggcggagcttgcagtgagccgagattgcgccactgcactccagctgggcaacagagtaagactccgtctcaaaaaaaaaaaaaaaaaaaaaaaaaaagatgcagacgggcacggtggctcacgcctgtaatcccaatactttgggaggcccaggcaggcggatcaccaggtcaggagttcaagaccagcctagccagcacggtaaaatcccatctctactaaaaatacaaaaaattagccaagcttggtgccgcgcgcctgtaatcccagctactcgggaggctgaggcaggagaatcacttgaacccaggaggcagaggttgcagtgagccgagatcgcgcaactccactccagcctgggcaatagagtgagactctgcctcaa[138 bp omitted]ctcagcctcccgattagctgggactacaggcgcccgcca[174 bp omitted]gttgcccaggctggaaagcaatggcgcgatctcagctcactgcaacgatgcctcccgcgttcaagcaattctcccgcctcagcctcctgagtagctgggattacaggcgccctccgccacgcccgaataattttttgtatttttagtagtgacgggggtttcaccactttggccaggctggccctgaactcctgtcctaaggtgatccgccagcctcggcctcccgaagtgctgggattacaggcgtgagccagcgcgcccggcctcagtgcttttccagcacataatttttatgagtatcctgtagtatcattagaacttctccatttactgcaagctaactccccctgagcatctagaactttaatacttgtccaaacctgcttgctcatggtctaataataaacccaattatacaatctgtaagaacccctgacaaccttttccttaagaagccataaaggtgatttaacgaacacctcaaactcttagtaaatgtatttcaaaaacagatttcatcactccagtctttggcttctgctgagggctagaggctactggttttagagtgggtagggggaagatcgcttgaactgagaatgacacacgccgggtgttgtacagcaggggtaagtgctggttcatttctctttaaatctggcagcacgtggggctgcattgtgaagccaccaacccgcctccccccttccactccgcacacggacgtctccactgcgcatgctccgcgcacacagtcctagcagagtaggagccaaccccctaaaaagtcaacctggaagccgcaaacggccggaggccgggacaatgggggaggggggccgcaggctcctcggggaggccgacccggccgccgccccgggccagagcctgcgggcgcagctccggggtttgcaggcctgcgcagcagccggaatcgcggcgagcacaaagcccggagccggccagcgagcggctctccccgcggcccgctcctaccctcccccagccgggcggcgcagccggagcccgtgccaggcggaggcaggcgaggcggcgatccgcactccgccagggtctccggcaccctcgcgcccgcgtggaggccgccgaggccagcgcttttgttgtcggccccaactccgcggacccagcgccgcccggggagaagttttgtgcgcctcacctatcccgccagggccggtcccttccgcccgccctcagacaccgagccggggactcgcagccgcactgggtccggacgctccagccggccccgaaggtccggcggccccggcagcacctgaacccgggacccgcccctccaagctggcggccccggcctggggacccgcacacagcccctcccccgcaacgtcctacagaacggtgggggaggggacctcctcctctccgaccccccgggcgccaggcccagtccctgggccggagctgggtcgcgtccccgcccccagtgccctccaagagccgggcgagaacggctgggcccggccgggaccggagcctcgaggtccccaccctcgcaggcccgggccccttcggcagtacggccgctggcccgggaggagaagagggactgggctgcggctgtccgcgatcgcggccgggcccggcgccccgccgcccgcctgctcacctgccagctgtcttcgcagtagcagtgccgactgcagctccgtcatcctccctgccgagggcccgggctggcgccggggcttccgaagggctggggacaggctctgggggcggctggagcggggtgtgccgaggaacccgggccccgcgaccggagcgccggagccgaggaaggccgggctgaggcggcgggagcggcgcctcgctgccggtgcgagtccgctcgcttcagctcttttcacagcgactcacgcccggaaggggagggtgcccgggctgccgcggcgcgcactgggacttcgctcgcccgcttccctccttcaacccgcccgtcggccccaccggtgccttcccccgccactgcctcactgcgcgcagggccgctcggcgcaggcgcgctgagactgccgacttgggaagcgtcccgcccgctagcccgacccctcggcctcccgccccgcccccggcggcggaaccccgccccttgagcgcagttgtcccgtccgccgccattttgggaaggtcgacgcccggctgccagcccaagcctccgctggtagacgccccgcggacgccatgacaaagaggtcgcagagggtcaaatacagcctctggattgaagcagtggatataggagcgaagaggccagaagaagtggtagatgtctagtccttggcgagcgcccaaaagccatctaacactgccacatggtgtgcgaagtaggaattgttagaaagccgaagttagtactggtgtgccccattttaaccaaacatcaaaatagaggcaatatatgatgataactcactttacatgaagagtgcacaaaaaaagccaccgcgtccggccctattattattgagccaccgagaccggccctgttattattatcatttatggacggcaattctctctgtcgcccaggctggagtgcagtgatcatagctcactgcagcttggaactcctgggcttaagggatcctcccatctgagtctccttagtatctgggattacaggtacacaccaccatgccctgctatttttttatttgctttatagagatcggggggtttgacggggcgcggtggctcatgcttgtaatcccagcactttgagaggccgaggtgggcagatcacctgaggtcacgagttcgagaccatcctggccaacatggtgaaacctggtctctactaaaaatacaaaaattagcccagcctggtggcaggcgcctgtactcccagctaccagggaggctgagaaaggagaattgcttgaacctaggaggcagagattgcagtgagccgagatggtgccactgcactccagcatggccgacagagagagactccgtctcacaaaaaaaaaaaaaaaggaggggggggccagaggtctctctgtgttgcccaggctggtctcaaactcctgggttcaagcagtccttccaactcggcctcccaaagtgttagcattacaagtgtgaaccactgccccctatcaaatagaccaaagggaccattttgatatttcactttaccaaatcaaggaaatttacttctattcctagtttctttcttttttattttatttatttatttatttattttttgagacagccttgttctgtcgcccaggctggagtgcagtggcgtgatcttggcccactgcaacctctgcctctcaggttcccgagttaaagcaattctcctgcctcagactcctgagtagctgggactacaggcgcacgcctccaggccaggctaattttctttcgtattttagtagagatggggttttaccatgttgcccaggctggtctcgaactcctgaactcaggcaatccgcctgcctcagcctcccaaaatgctaggattataggcaagggccactgtgcccggcctattcctagtttcttaagatttattttttgtaaaaaaaaaaaaaaaaaagatttattttttgtaataatttccaaatctggtgaaagatcagggctggataaaggtttagaaattgaacctaatccttaaacagtgggaggcccctgaaaagttttaactaggagtagaaaaatagcagacttgcattttgaatgttttgctgtggctgcagagaattgatgagggagggagggtcaagaccagtgccctgcaggctgtggtggctctcatctgtaatcccagctctttggaaactccacgcaggaggatcacttgaggccaggagctagagactagcctgggtgacagagcaagaccctatcgctacaaaaaagtgtgttttgttttgttttgaaacagtctccctctgtcgcccaggctggagtacagtggcacaatctcaggtcactgcacctctgcctccctggttcaagtgattctcgtgcctcagcctcctgagtggcagggattacaggcctgtgccaccatggctggagaatttttgtattttcggtagagacagagtttcaccatgttggccaggctggtcttgaactcctgggctcaagtgatccacccgcctcagcctcctaaagtgatggaattgcaggcatgagccactatgcccagcccaaaatatttttttaataaacattttaaaattttaataaaaatttttaaagcctggagacccttatggagattgtggcagtaactaagacttggattaaggagtgtccataaaatatttaggccttggtggccaggcgaggtggctcacgtctgtaatccccgcactttgggaggccgaggcgggcagatcacctgaggtcaggagttcgaggccagcctgaccaacatggagaaaccccgtctctattaaaaatacaaaattagggcctagggcagtggttcactcctataatcccagcactttgggaggcca[132 bp omitted]tgaggcaagagaatcgcttgaacccagaaggcagaggt[133 bp omitted]ggaggccgaagcaggagaattgcttgaatccgggaaggggaggttgctgtgagctgagattgtgccattgcactccagcctgggcaacaagagtgaaactccgtctcaaaaaaaacaaaaaacgaaaaaacaaagaatatgtaggccttggtgatctatgggatataggaaagagcagggagcaccacaggtgactctcctgacccgggtgactgggtgccattggtatgacagaccaagtccaaggagtgggtctcgctttgttggttaggctggtctcaaactggtctcaagcgatcctcccgccttggcctcccagagtgctgggattacacgcgtgagccactgcacctgggccctcttgcttttgaggttaatgccatccagctgcagcacttgccactcccctttggtgctgtgacctgcagacccattcatcatggacttttcctcctgcctcagagcccttctcttcattctactccagccctccaccttggggacctaattacccacatgaatgacccgtccggtacccctgcctctcaccacttgacttcctctccttcccttcccaccagctggcctctccgtgttcccgtgggacagtctcgccacccaaaattccaccacaccccagtacttggtttcaagccacgcaccctgaccaccattccttatccttccagcttactggctttagcgttcacgccacacagctcttccacaccaacaagaccccattctgtgtaccacttttttttttcttttctttttaaaacagagtctcgctctgtcaaccaggctggagtgcagtggtgcgatctcggctcactgcagcctccgcctcccgggttcaagtgattctcctgcctcagcctcccgagtagctgggactataggcgcgtgccaccatgcctggctctttttttttgtattattggtagagatggggtttcaccatgttagcaaggatggtctcaatctcctgacctcgtgatctgcccacctcggcctcccaaagtgctgggattagaggtatgagccaccgcgtccagccctgtttaccacttttttactatctgtcatttccttcctgttctcctcttccttctcttctgagcttagagagtagtccattactacaacccttctcttcatacgccctcaacaaacttggctgtttgtctccttctctcaccattttagtgcctggctgatcctcaagcctgaatgaacgcttgcacacccaactgtctaactattgctttatttaacaaacatttactgagcaactgctatgagctagacacaatcctaggactcaaggtctaggtgtaaactacactgaccaggttcctacctcatgacagtaacatctaatgggacagaatagtcaaaaagtaaacaacagccaggcgtggtggctcacgcctataatcccagcaatttggaaggccgaggtgagtggatcacctgaggtcaggagttggagaccaacctggccaacatggagaaaccctgtctctactaaaaatataaaaatcagccgagcatggtggcacatgcctttaattccagctactcgggaggctgaggcacaagaatcacttgaacccgggaggcagagcttgcagtgagctgagatcagagtgagactccatctcaaaaaaaaaaagaagtaaacaactattaaggtcaacatttgttcaggcctggtagctcacgactgtagtaccaacacttagggaggtcgaggcagtcagatctcttgagcccaagatttcgagaccaacctaagcaacaaggtgaggccgcatctctacagaaaatttaaaaactgtccgggtgcggtggctcatgcctataatcccagtactttgggaggccggggcgggtggataacctgaggtcaggagttcgagaccagcctggccaacatggtgaaatcccgtctctactaaaaatacaaaaattagccaggcatggtggcaggcacgtgtaatcccagctactcgggaggctgaggcaggagaatcgcttgaaaccagaaggcagaggttgcagtgagccgatattgcaccattgcactctagcctgggggacaagagcgagacttcgtctaaaaaaaaaaaattaaaaaattaaccagacatggcagaacatgcctgtagtcccagctattcaggagggttgaggtgggaagatcccttgagcccaggaagttgagactgcagtgagccatgatcacaccactgcactccagcctggacaaaagagcaagaccctgtttccaaaaaaaaaaaaaaaatcagcattggattatgataagtgataagatggaaatgaatagggtgtgtgaacaactgaggaatagggtctgttctagataaaatagggaaggcctttgaaaagattttaattagaatgagattacaaacaggatatgccatttgatgattctggggacgagcattccaggcagagcaaatggttactgctaaagcccagtggtaggaaagactctcaattgagaattatcagctgctacaaagaaagactagaaagggtggggtgggatgcggtggctcaagcctgttattccaacactttgggaagctgaggcaggaggatttcttgagcccaggagtttgaggccagtctgggcagcatcgtgagacccaccccaccctctcccccacggcccgcaagtcccagccgtctcatttttttaaataataaaaaataaatttaaaatttaaaaaaataataaaaaggccagaaaggagatcagcatggatgggcagctccattacagcctaatgaaaaagcggctgtaagtggaggtgggagaggcaggcaggtgtcatctcagaggaccctgttgaccacagtgaagagttcagaatttcatttagttgcaataaataaaagccttcggaggagagtgatctggattacttgttttttctttctttctttctttgagacagagtttcactctggtcgcccaggctggagtgcaatgacgtgatctcggctcactgcaaactccgcctcctggattcaagtgattctcctgcctc[134 bp omitted]cagcctcccaaagtgctgggattttaggcgtgagtccctgtgccccaccagagttactttttttttcttttctttttttttgagatggagtcttgctctgtcgccaaggcaggagtgcagtggtcactgcaagctccaccttccgggttcatgccattctcctgcctcagcctcccaagtagctgggactacaggtgcacgccaccacgcccggctaatttttttttttttttttttttgtatttttagtagagacggggtatcaccgtgttagccaaggtggtcttgatctcctgactcttgatcctcccaaagtgctgggattacaggtgtgagccactgtgcctggccgtttttttttttttttttagacgaagtcttgctctgttgccatgccagaatgcagtggcactgactgcaacctccacctcttgggttcaagttattgtcctgccttagcctcccaagtagctgggattacaggcacccaccaccacgcccagctaatttttgtgtttttagtagagacggggtttcatcatgttggccaggatggtctcaatctcctgaccttgtaatcctcccgcctcagcctcccaaagtactgggaatacaggcgtgagccaccgtgcctggccaccagatttacattttttaaatctcattttgtaatttattgaaaagagggctgggtgtagtggctcacgcctgtaatctcagcactttgggaggctgtagtgggaggagcgcttgagcccaggaattctagaccagcctgggcaacatggtgagaccccgtctcttaaaaaaatggaaagaaaaaaagagggaaaaaaataaaagagaaaacattgctagaagacaagttagaagtctatcacagaagataaggcaaagttcctgatggtttgaaccagaataggagcaaggatgataaaatttgtcaggagagtggaatgggaaaggatttgaaatacagttttaaatttaaatggaaaggtcttgctaataaatgtgggtggggggaaggggaagaatcaaggatgattcctgggtttatgacttctggaataactggtttgatttcaaaatggggaagagtatagggtttggagtgataccaagtcatctattttggatgagttatgttttgtttgtttattagacatccaatcagaggtgtcacattagcatatgctaataagacaagctcagcaaagagaccaaagctacagacataaatttgtagaggtcagtgttaggtttcctggggagaatgtgtaatgatgtttaaaaacaaaacaaaaaagcagcccgggcaacatagtgacatagtgagactccctctctacaaaaaaatgaaaacaatttacctaggcatggtggcgcatgcctgtagtcctagctactcaggagactaaggcaggaggatggcttgagcccaggagtttaaggctacagtgagctatgatagcaccaccacactccagcctgagtgacacagtaagacaatatctgtaaaaaaaaaaaaaaaaattaaaaataggccgggtgctgtcgctcacacctgtaatcccagcaccttgggaggctgaggcaggtggatcacctgagatcaggagttcgagacaggcctggcaagcatggtgaaaccccttctctactgaaaatacaaaattagccaggtgtggtggcaggcgtctgtactcccagctactcgggaggctgaggtgagagaatcacttgaacctgggaggtggagggtgcagtgagccaagatcgcaccattgcactccagcctgggtgacagagtgagactccatctcaaaaaaaataaaaataataaaaaataaaaaataggcctggcgctgtggctcatgcctgtaatcccagcactttgggaggctgaggtgggcggatcacttgaggtcaggagttcgagcccagcctggccaacatggtgaaaccccttctctactaaaaatataaaaattagccaggcgtgttggcgcgtgcctgtaatcccagcaactcaggaggctgaggcaggagaatcgctggaacccgggaggcggaggttgcagtgagctgagatcgcgccattgcactcaagcctgggcaacagagtgagactatgtctccaaaaaataaagaaataaataaaaataaaataaaaaataacaataaaaaggcctaaaaatgagccctgaagcaccccaagatttagaggtcagatggagaaggagccagcaatggaggctgagaaagaaaagacaaaagaggagagaaacttggtgtggtttcgcaaaagccaagatgagaaaatgttcccagaaagaaggaatgatcaacaactccatgctgctgagaagtagagaaagacgaaggctgagaggtgtgctttgaattctgaaaccgggaagttgctgctgaccctgatggaggatgttgatggagcagtgttgagggctgtcagagcagcgtgggctgaaggttgagtagagggcaaggaggtggaggtttcaatgctgggagtttatttgaggtttgtggtcatgaactgaaagtgcaacctgtaggtccagttgaggtttttcttatttttttttccagtaatgttcagttgctcaggtgcagttatgacttgtagttgggttcattcaggcttgaggatcagccaggcaagtaaaacggagagagagggagacaaacagctgagttggttgagggtgtatgcagagaagggttgtagtaatggactattctctaagcttggaagagaaggaagacaaaacagaagggaaatgacggatagtgaaaaatggtacacagaacggggtcctgttgaggtggaagagttgcatggtgtgaacactaaatcaagtaagctggaaggataagaaatggtggtcagggtgggtggctggaaactgagaatcagggggtggtgcagttttgggtgacaagactgtctcatgtgaacataggccagctggtgggaaggggagaagaggaagtcaagtggtgacaggcaggggtactggatgggtcatccacgtgggtaattaggtccccaaggagaagggctggagtagaaggaagagaagggctgtgaggcaggaaccaaagttcgtgatgagggggtctgccggtcacagcaccaaaggggagtaacaagtgctgcagctggatggcattaacctcaaacgagctaggggctggccgggcgtggtaggtcacacctgtaatccccaaaatttgggaggccaagaatgggcagatcgcttgaggccagaagttcgaccagcctggccaacgtggtgaaaccccgtctctactgaaaatacaaacattagcctggcatggtggcacacctgtagttccagctactcaggaggctgaggcaggagaatcacttgaaaccgggaggcagaggttgcagtgagctgaaattgcaccagcctgggcaacagagtgagactctgtctcaaaaaaaataaaataaaaaagaaacaggttctcaaactcctggcctcaagccaccttttccctctcagcctcccagagtgttgggtttacacttgtgagccactgcacctgggcccttgcttttttgtttgtttgtttctgttttttgagatggagtcttgctctgtcgcccaggctggagtgtagtggcacgatctcggctcactgcaacctccgcctcctgagttcaagggattctcctgcctcagcctcccaaatagctgggattacagatgtgtgccaccacgcccagctaattttcgtattttaataaagttggggtttc[142 bp omitted]ctctgtcacccaggctggagtaccgtggcatgatctctgctcactgcagcctctgcctcccgggttccagcgagtctcctgcctcagcctcccgagtacctgggattacaggcacacaccaccatgcccagctaatttttgtatttttagtagagatgggggttt[144 bp omitted]cactgaggctggagtggtgcagtgccgtgatcttggctcactgtctgcctcctgggttcaaccgattctcctgcctcagcctcccgagtagctgggattacagatgcccaccacgacgcatggctaatgtttgtattttcagtagagacggggtttcaccacgttggccaggctggtcgaacttctggcctcaagtgatctgcccattcttggcctcccaaattttggggattacaggtgtgacctaccacgcccggccagcccctagctcgtttgaggttaatgccatccagctgcagcacttgttactcccctttggtgctgtgaccggcagacccgctcatcacgaactttggttcctgcctcacagcccttctcttccttctactccagcccttctccttggggacctaattacccacgtggatgacccatccagtacccctgcctgtcaccacttgacttcttctcctccccttcccaccagctggcctatgttcacatgagacagtcttgtcacccaaaaccacaccacaccccaaattctcggtttccagccacccatcctgaccatcattttttttttttttttttttgagacatagtcttcctctattgcccaggctggagtgcagtggtgcagtggcctgatctcggctcaccagaacctctgcctcccgggttcaagctattctcctgcctcagcctcccaagtagctggaactacaggcatgtgccaccacgcctggctaatttttatattgttagtagagatggagtttcgccatgttggccaggctggtctcaaactcctgaccttgtgatccacccaccttggcctcccaaagtgctgggattataggtgtgagccaccataccatacccggttgaaaccgtgtttcttttttctttctttctttctttttttttttttttgagaaggagtctcacttagttgctcaggctggagtgcaatggcaggatctcggctcactgcaacctccgcctcccaggttctagtgattctcctgcctcagcctcctgagtagctggggctacaggcgcccgccaccacggccggctaattttttgtatttttagtagagacagggtttcaccgtgttagccaggctggtctcgaattcctgacctcgagtgatcgcctgcctcggcctcccacagtgctgggattataggtgtgaggcaccgcgcctgaccccattttggcttaaatgtctgcccttcacaatctagtctctagggatgctctagcctcatcctgacacactctacttctgacacactacacttctttccttcctccaaaaggtctttccatttggtgttacaatagcttaaaacactcttttctgggccaggcgtgctggctcacgcctataatcccagcactttgggaggacgagacg[132 bp omitted]gaatcgcttgaacccaggaggcggaggttgcagtgagctgagatcgcgccattgcactccagcctggcaacagagcgagactccgtctcaaaaacaaacaaataaacaagcaaatagcactcatttctgctagatgtatgtggttaatacctacaaatccatctttcagatccttgaaagaagcaacttcctccagaatacctctggcaatctctaaactaatcttatcttccctgtttcctacttccagcttgtattacatctcttatcctagcatttgtcatgcaggattgcagttgattatttttcttttctgtgtataagcttgtgatggcaggactgtctttcatgtctttgttcgcagagtttaatataatgatgctatacagtagcacctaacaaatatctcctgaatgaactcatgaatcctataaaatcaataacagggtaattctcccagataagtataggactctgcttatttaatttgggtatttggatttgtgtacctggcagagggtggtaccaaatagcgtgcctcatgttcttttttttttttaatctaaagtaaagttagtaaagttaacagagtcttattctgtgttcttgacaccacagaataagcctctattaactttactaactttttgtagattaaaaataataataataataataataattaaaggaaaataggccaggtgtggtggctcacacccgtaatccgagcactttgggaggccgaggcaggtagattgcccaagctcaggacttggagaccagcccagccaacatagtgaaactccgtctctactacaaatacaaaaaattagctgggcgtggtggcgggcgcctgtaatcccagctactcgggaggctgaggcaggagaattgcttgaacccgggagccagaatctgtgtcaaaaatgaacaaaaaaaggacatctcaggcgcgctcatgtgactagtggttatggtgctgaacagtacaggtttagagcttcctagcctaattgtcttgctggctcagacattcttttttttttttttttgagacagtcttgctctgccgtccgggcgggagtgcagtggtgcgatcttggctcagggcaacctctgactcttgggtcaagtgattctcctgcctcagcctcccgagtagctgggactacaggtgcatgccagcacgccctgctagttttggtatttttatttttattttttattttttattttttttgagatggagtctcgccctgttgcccaggctggagtgcagtggcgcaatctcggctcactgcaagctccgcctcccgggttcacaccattctcctgcctcagcctcccgagtagctgggactacaggagcccaccaccatgcccagctaattttttgtatttttagtagatacggggtttcaccatgttagcgaggatggtcttgatctcctgaccttgtgatctgcccgcctcgcc[134 bp omitted]cagcctcccaaagtgctaggattccaggcgtgagccactgcacctggccttttttttttttttttttttttttgagatggagtttcgctcttgttgcccaggctggagtgcaatggcatgatgtgggctcactgcaacgtctgcctcccgggttcaaatgattctcctgcttcagcctcccgagtagctgggaataaaaggatgtgccaccatgcctggctaatttttttatttttagtaggtgggggggtttcaacatgttggccaggctggtctcaaactcctgacatcaggtgatccacctaccttggcctcccaaagtgctgggattacaggagtgagccactgtgcccagctgcctggctaatttttgtatttttagtagagacagggtttcagcatattgggcaggctggtctcagaattcctgacctcatgatctgcctgcctcggcctcccatggtgctgggattacaggcatgagacactgcgcctggccttcctttatgcttttttttctttttgagacagatcctagctctgtcacccaggctggagtgcagtggctcaatcctggctcactgcaacctctgccttccgggttctagcgattcacctgcctcagcctcccgagtagctgggattacaggtgcccccccaccacgcccatctaatttttgtatttttagtagagacagggtttcactgtgttggccaggctggtcttgaactgctgacctcgtgaaccacccacctcggcctcccaaagtgctggaattacaagcgtgagccactatgcccg[173 bp omitted]atggtggcgggcgcctgtaatcccagctactcagcaggctgaggcaggagaatggcgtgaccccaggaggcggagcttgcagtgagccaagatcctgccactgcactccagcctgggcaacagagcgggagagcgagactctgtctcaaaaaaaaaaatttttttttttgatctcgctatgttgcccagcttggtcttgaactgctgagctgaagtgatcctcccaccttgccctcccaaagtgctaggattacaggcatgagccactgcacccagcctttttatgactttttcatcatcagaaacagctccaaggaagcagatgtagctctttagagtggccagggtgacaacagttcctggcgtgctatgggtgacacgggcaggaaacacaacttctgcttaaaagacagcctcagtgagcaggtgactgaagacaaggctcataaggggcttgggatccgtgaccctgaaaggcgggagggtgattaaaagcaatcacatgtggtgggcgcctgtagtcccagctactcaggaggctgaggcaggagaattgcttgaacccgggaggtagagattgcggtgagcggagatcatgccattgcactctagcctgggcaacaagagcaaaactccgtctcaaaaaaaagcagtcacaatgtgggaatggcatcccccagcctgggactgccctgagcctgtggctcaggacatcagcatttgatgccactcttccaggttcatagacatgctgtgagcagaaaagtccagactcttggtgtcggcccagactgcagaagccaaagagtggtggtgccctttctggctgctgtgatgacagccaaggtttcctcctcctcttcgcacagtgggtaggtccctgctggggctaacaggtttctggatttttattgattgcccagcactggctggtgagaaacagtacctgtgctgaaattgccaatttaccagtctcctttccccaaatggcagtgctgagactaaaggctggctctgaaatattgacagcctcacttcctgcctgccaattcagttttgtcatgtaataaaaagggaatacaacctcacaggattactgtgaagattaaatgagaaaatgcagacaaaggctcagcagaatacttggcatgccgtagttgctcagaaattcccttcttgctttgtccttcaaggcttaacataaatattgtctttttttttttttttttttttggagacacgatctcactctgtgatctaggctgtagtacagtggtaccatcatagctcactgcagccttgacctcctgggctcaaacgatcctcccacctcagcctctggaatagctgggactacaggcattcgccaccacacctggctgatttttagattttttttgtagagccagggatctcactatgctgcccaggctgatcttgaactcctggcctcaagtgatccttcagcctcagtctcccaagtctttgggattataggcatgaacagtggttcatgacatggcctcacaaatatcatctgacacattaaattcctttaacacctcacctcacctagaccccaaatcagcccttttcgggaatcccaagaccttttgcccattcttttgtttttttgttttgttcttttgtttttgttttcgctcttgttacccaggcaggagtgcaatggtgcgatctccggttcactgcaacctccgccacctgggttcaagcagttctcctgcctcagcctcccgagcagctaggattacaggccaccatacccagctaattttgtatttttagtagagacggggtttct[131 bp omitted]ttgtttgtttgttttgagaggtagtatcactctgtcacccaggatggagtgcagtggtgagatctcggttcactgccactcccacctcccgggttcaagcaattctcctgcctcagcctgctgagtagctgggactacaggcgtgtgccaccatgcctggctaatttttgtatttttagtagagatggggtttcaccatgttggccaggctggtctcgaactcctgaactcaggtgatccacccgccttagcttcccagagtgctgggattacaagcgtgagccaccacacccacccttgcccattctttacaggggcccatgcagatacacagggataaaggaacccacagtgtgatgagtatgaagaggctgtgagctgat[137 bp omitted]cgcctcccaggttcaagccattctcctgccttagcctcccaagtagctgggattacaggtgctagccatcatgcccagctaattttttgtatttttagtaaagacagggtttcaccatgttgcccaggctggtcttgaactcttgacctaaagtgatctgcctgcctcggcctcccaaagtgttaggattacaggtgtgagccaccacacctggccaaacttaacatttctaagcaacagatcattttttttttttcttttttctttttttttttttgagatggagtctagctctgtcacccaggctggagagcagtggcccgatcttggctcactgcaagctctgcctctcgggttcacaccattctcctgcctgagcctcctgagtagctgggaccacaggcgctcaccaccacgcctggctaattttttgtatttttagtagaaatggggtttcaccgtggtagccaggatggtcttgatcgcctgacttcatgatccgcccacctctgcctcccaagcagatgggatgacaggtgcatgccaccacacccggctagtttttgtattttttgtagaaatagggcttcaccatgttgctcacgttggtcttgaactcctgggctcaagtgccttgacctcccaaagtgctaggattacaggtgtgaaataattccttaatatcatcaaatattcagtgttcaaatattcccactgtctcatcatcatcatcatcattctatttatagtttgtttgaatcatgacctgaaaaagatccataggccaggtgcagtggctcatgcctgtaatcccagaactttgggtggccgaggcgggcggatcacctgaggtcgggagttcgagaccagcctgaccaacatggagaaaccccatctctactaaaaatacaaaattagccgggcgtggtggcggatgcctgtaatcccagctacttgggaagctgaggcaagagaatctcttgaacccaggaggcagaggttgcagtgagccgagatcgtgccatttcactccagcctgggcaacaagagcgaaactccatttcaaaaaataaaaaataaaaaagatccataagttttggttggttaatgtgtctcttaagtttcctttaatcactaggttccctcttctaaaatctttctgttttccttgcaatttattaaagaatatttgtcatgtgttc[131 bp omitted]tgaaaccccatctctactaaaaatacaaaaaattagccaggcttggtggtggatgcctgtaatcccagctacttgggaggctgaggcaagagaatcatttgaacccgggaggcggaggttgcagtgagccgagatggcgccactgcactctagtctgggcaatgagtgaaactccatctcagaaaacaaacaaacaaatagaaaaaaacaaataaaatctgggttttactgattgtgtcctcatggtatcatttaacattcttattttctttatttcgtgtaaagcagtagtcggatctagcagcttgatcacctttggggttgattttgttcctagactctttcatatgcagtattgggtacttccattaagaggtacatcattctgatttttctttgtttcctagtttttctttctttttttgttttctctgttttgttttgagacagggtctcactctgttactcaggctggagtgctgtggcaggaacatagttcactgcagcctcgaccccccggggttcaagcaattctctagcctcagtcccccaagtagctgggactataggcacttgccaccacacctggctaaatgttgtcttttttgtagagatggagttctccatgttgcccaggctgggatagtctctaatagggtttatagtggacctttttaatattatcatcacccagcatcttttttttttttttttttttgagacagtttctgtctgttgcccaggctggtgtgcagtagtccgatctcggctcactgcaacctccgcctcctgggttcaagggattctcttgcctcagcctcccgagtaactgggattacaggtgtgtgccaccacgcccagctaatttttgtatttttagtagagatgggttttcaccacattggccaggctggtctcaaactcctggcctcaagtgatcagcccgcctctgcctcccaaagtgctgggattacaggtgtgagacaccgcgcctggccattcagaatctttttgaaaacccattctatgtcaagacatgatgagttctgcctccccaaggtagaagctagactcctgtacctagcttccctagcactcaggcatacagtgtaggctcatccaatcagatgcagctgatatccattcagaggtgagctgtacgaggatgagaatgctgtagagacacggagatttttttgtttgtttattttgtttgttttcagacagagtctctatcacccaggctagagtgcagtggcacgatctcggctcactgcaacctccgcctcctgggtccatgcgattctcctacctcagcctcccaagtagctgggactacaggtgcccaccagcacgcctggctaattttttgtatttttagtagagacggagtttcactgtgttaggcaggacggtctgaatttcctgatcttgtgatccacctgcctcggcctcccaaagtgctgggattaccggcgtgaggcaccgtgcctggctgacacagagcttttgagggcagtgggagtggaggccccaggagtagagatactccttccacttttgagctgcagtggctattgatggcaaaaagcagaggctgtgctgataacagtccaggagcaaaatttgggtattgttcctggccaagtagcctccaagcccaattctctatccctctcagagactgtgtgagtcatttatatctttaaatacattccttggctgcttaaactagttagagtagattctgttgttgtagctaagttccgtgacaattatgaggcttccatgatgtagctcaatatagcgtctggtactaggaggggagcagtcaaactgtacctgtagcctctggttttccaggtagatgagatagtacattttattattgtttgtttcacttcaagttgggttttcttttctttgttcttaaaagcatccacgggcaggcgcagcagctcatgcctgtaatcccagaactttgagaggccgaggctggtgggtcacttgaggtcaggagtttgagaccagcctggcccacatggtgaaacctcgtccctaccaaaaaatacaaaaattagcagggtgtggtggcgagtgcctgtaatcccagctactcgggaggctgaggcaggagaattgcttgaacccaggaggcagaggttgcagtgagccatcatgccactgcactccagcctgggcaacagagcaagactccatctcaaaaaaaaaaaaaaaaaaaaaaaaaagcatccagttgatttccacaagcaacttcagtgtctggctgcatttagggtatgctcaacacgtgttccttcataaccaccttttaaaatgacctgataattgacatacaacttacgagttttgacatatgtaagcactcacgaaaacatcactcaattaagataataaacctctccatcacacctaaaagtttctttgtgccttgctgtaatctttctctctttcctttcactccagccactttctgatccccgttctgtcactttctagaattttttgtaaatgaaagcaaacatatgtactctctttggtcttctttcactcagcataattattgtacttatttatttatttttatttcatttatttatttttttttgagatggagtctcgctctgtcgccaggctggagtgcagtggtgcaatcttggctcactgcaacctctgcctcccgggttcaagcgattctcctgcctcagcctcccgagtagctgggactacaggcacccgccatcacacccggctaatttttgtatttttagtagagatgggggtttcact[136 bp omitted]tattattgagacagagtcttgctgtctcccaggctggagtatagtggtaaaatcatggctcactgcagcctcacattcctgggttcaagcaatcctcctgctttagcctcccaggtagctgggactaccagcacataccaccactcctggctaattttgaaatgttttgtagagacaggggtctgactacgttgcccaagctggcataattattttaag[134 bp omitted]tccgcctcctgggttcaagcaattctcctgcctcagcctccacagtagctgggattacaggtgcccaccactatgcccggctaatttttgtatttttagtagagacagggtttcaccgtgtcggccaggctggtctcgaactcctgaccttaagggatccgcctgcctcagtctcccaaagtgcagagattacaggtgtgagccaccgtgccgggccgcagctgcttcttaaagcctgtcactagaggctgggcgcagtggctcatgtctgcaatcccagtactttgggaggctg[132 bp omitted]aggctgaggcaggagaattgcttgaacctggaggtggaggttgcagtgagctgagatcacgccactgcactccagcctggcgaaagagtgagactctatctgaaaaaaaaaaaagcctgtcactgacgagctgcattggaaccacctggagacacctgttaatacgtagctgtctgggcccaagcccctcttcttgcagatgaggccccaagaaggggagtgacttcttcagggagccagggctaatttaggacaggaactcaagtcctgattccaaacttaggacgaaaagaagggggaatgaggagcaggaaatgtgtccagttttgactcctctgattcccgtgtatttttcctttggcttctaatattaagagaaaggcccagtactatattaagaggaagacccagtactttggaacaaggtggcttcctgctgaggctgggtcttgtgtgtactctgaggcctcagattgctgtggccgggcatctcgggtctcccagccacctgcatagacctggctcaggaaaggagctgggtaggatcccagctttagcatgaggcaagagctacctcctttgaatgggcaaaagaaggcggggaggagagtccaggcagacaggtaaactatgcagagcctgatagagtaaggaggaagccagggataggccaggcttcagctccgcccctgggccagactagggcctcagtgggcagaggcaggagaagctgccaaggcctggggagccgaccctccacagaagctagcagggccccgtcaggatccaccagcccaggcagatgcagctttgcctatgggctcctgctcggtgccagagaaatgaccctgtccctcgggtgatgggcactgcatcctggtttcaacaatgtcattttatattatcccccctgcatgccatcaaatattttcttttttttttttttagatggaatcttgctctgttgccaggctggagtgccgtggctcaatctctgctcactgcaacctctgcctcccgggttcaacaattctgcctcagcctcccaagtagctgggattacaggcgcacactgccacgcccagctagttttttttattttagtggaaacggggtttcaccgtgttgcccagcctggtctgaactcctgagctcaggcaatctgcctgcctcggcctcccaaagtgctaggattacaggtgtgagccaccgcacccggcttttttttttttttttttttgcaggtggagtctggatgtgtcgcctaggctagagtgcagtggcgcaatctcggctcactgcaacctccacctcctgagttcaagtgattctcctgcctc[134 bp omitted]cagcctcccaaagtgctgggattacaggtgtgagccactgcgcccagccaaatgttatcttatggtcactgcaccagtattcatttggctgattagaagtaagatttaggaagagtgtaggaatagtctcctgatccaaaactcccattgtctaaacgagaaactgaggtccagggagagggaggacctggcccagggccatgcagctatttaatatgtttatcatcttctctagtggaacactgcgggagaaaagttgcttgcttttgaaattatttacatatgcatatatactttttacatataaaatatgaaatacatatttcatgtatacatatgaaatatatgcataaaagtcaaaaggcaccaaaaattcagtctccctcccactgctatccctggtctcacagtgcttcaccctaggacacccactgttgttacctctttcttatttatctttctagagacatttaata[136 bp omitted]cctgggttcaggtgattctcctgcctcagcctcccgagtagctgggactacaggcgcccgtcaccatgcccagctaatttttgtatttttagtagagacagggtttcaccatgttggccaggatggtctccatctcttgatctcgtgatccacccgcctcagcctcccaaagtgctagatttacaggcataagccaccacgcccagcctataaatttttttttttttttgagacagaatcttgctctattacccaggttggagtcttggctcactgcaacctccacctcctgagctcaagcgatgctccacctcagcctcccaagtggctgggactacaggtgcacaccatcacacctggctaatttttttttttttttttttttcagagacagggtttcaccatgttgcccaggctggtctcaaactcctaagcccaagcaatccacccacttttgcctcccaaagcggtgggattacaggtgtgagccaccgtgcccagtcacatgctttttctgtttgtttgtttgtttgtttgtttaagacggagtcttactctgttgcccaagctggagtgcagaagcatgatggctcactgcaacctccgcctcctgggtacaagtgattcttctgcctcagcctcctgagtagctgagactgcagttgcatgccacaatgcccggttaatatttttgtatttttagtacagacgaggtttcaccatattggccaggctggtctcgaactcctgacctcatgatctgctgggactacaggcatgaaccaccatgcctggccccctacgtgtttttaaatcaccaaatttacatgctatatttactgtttggcactttacttttgcatatatcttaactaagatgacttaattttagtacctagttgcctcattctttgtattagtacataatatttaattggatggttgtagcataatttatttaaccagctgccatgtagttccaaactttagctatgaaaacaatgctgcaggagaatggcatgaacccgggaggcggagcttgcagtgagcagagatcgcgccactgcactccagcctg[131 bp omitted]ctgaccaacatggagaaaccctgtctctactaaaaatacagaaaaatattagccaggcgtggtggtgcatgcctgtaatcccagctacttgggaggctgaggcaggagaatcgcttgaacccgggaggcaggggttgcagtgagctgagatcgcgccattgcactccagcctgggcaacaaaagtgaaactccgtctcaaaaagagagaaaaaaaagaaagaaaacaatgctgcaatgactgtcctggtgcatattatatatatcttgggttacctgtgtacctgtagtgtaaatttctgaaagtgggattactggaacaaagagtttgtgtatttcattttttgatagatattaccagtttgccccataaaggggttgtaccagttaactttcccaccaacaaacaaggtgtggcagtgcctgtttcagacaccttcatccccagcctggacaacatggcaaaaccacatctctacaaaaaatataaaaattagctgggtgtggcgggcacgcgcctgtggtccctgctacccagctacctgggaggctgaggtaggaggatctctggagcacaggaagttcaggctacagtgagccatgatcgtgccactgcactccagcctgggtgacagaaggagacctgtctcaagcaaacaaacaaacaaacaaaaagcaaagaacagacaccttcacccacttgagtgattttgttttgtttgttttgccaatctgataagtggaatgttctttctcatagttttaatgtacatttttaaaacatcccccaggtgggagcagtggctcacccctgtaatcccagaacttcaggaggctgaggcgggcggatcacctgaggtcaggagttcaagacgagcctgggcaagttggtgaaaccccatctctactaaaaatacaaaaattaggagggtggatcatgaggtcaggacttcaagaccagcctggccaagatggtgaaaccccatctctgctaaaaatacaaaaattagccgggcatggtggtgggcgcctgtaatcccagctactgggaggctgaggcaaaaattgcttgaacccgggaggcggaggttgcagtgagctgagatcatgccactgcactccaggctgggctacagagcaagactccgtctcaaaataaataaataaataaataaataaataagaggccgggcacagtggctgacacctgtaatcctagcactttgggaggccaaggcgggcagatcacctgaggtccggaatttgagaccagtctgaccgatatggagaaaccctgtctctactaaaaatacaaaattagccaggcatggtggcgcattcctataccagctactcgggaggctgaggcaggagaatcgcttgaagaacctgggaggtggaggctgcggtgagccaagatcgcaccattgcattgcactccagcctgggcaacaaaggcaaaactctgtctcaaataataataataataataataaataaaacatccccctcccccttaatatacatttttcatattatgaataagattggccaggtgcagtggctcacacctgtaatcccagcactttggaaggccgaggcaggtgcatcacctgacttcaggggtttgaaaccagcctgaccaacacggtgaaaccccatctctactaaaaatacaaaattagccagccgtgatggtacacgcctataatcccagctactcaggaggctgaggcaggagaatcgcttgaactggggaggtgaaggttgcagtgagctgagatcaagtcactgcactttagcctgggcaacaagagtgaaacgctgtcccccaactccaaaaaaaagattgagcctctgcaatagaaacccagaggcccgtctgtaagtggagtgggcttcggccctggccccaggctgaggcactgtgtctctactccccaccttgcagataagatggcttggcagccgggaccctcggccctcccaggagctgtctcctgcagcccctcacctgggatgagtaacatttatctggggagactggaagaggcatgttttactcagacatcctggtttgtcctgcttttctctccctgagggctgggacttaccctccaatgcaaaacgggcagatttgcagcaggggaatggcaagatgagacctgcttttattggaactgagctggaaccgatggggagtggggaggaggctgcagcaggtggggagagtgaaaatgagtgagccgagcagccggatggacccagagatcctcagaggtggccccactggggacaatggggtgagatagaaccgagggagagaagcagacaggtgacccccgggagcagggagagttggatggtgggtgagttggaggttgtttgtgggatggacaaaggacatgaagaaatgtttgttagatgaatgtcctcccagaggctaaaggaatggggtagtcacatgtccaacccaggatgtgaatgtggccagtctggccacagcaagttaaactacctctggggtgtgtcctgctcctggcttcctgtaatctggttccttggaggctaattaacacagagctagctttgctccaggtttcccaccttggtgtagctccttccatgctgtctcttggctcagggatggatgggttggggagcgggctcctgactgatggagggggtagtatgtaggctggaggctggagagctgggtccagctaagcctagcccccatccaggcttccagagtgtgtttgctgctggcttgagatcagcaggtagtgaaccaggccaggaggtcattgccctctccaggccttggtattctagatccttctcctcctttggcccatcttccttccttccttccttctttccttccttccttccttccttccttccttccttccttccttccttccttccttcctgccttccttccttccttccttttttctttctttctctctctctgtctctctctctctctctttctctttctttctttctttctttctttgagacagagtctcacactgacacccaggctggagtgcagtagcgcaatctcagctcactgtaacctccgcctctcaggttcaaaggattctcctgcctcagcctccctggcccatgtttattccagtggctcttgccctctctctcccacagttgccaatcccaaatgaagatatctctcaggggcagcaagaacccccattctaagcactttaacctcttttcttaggatagccagataaaatacagtaacactcagttaccagcctggacaacacggcgaaaccccatctgtaccaaaaatttttaaaaaagcaacaagtagctgggaatggtggcttgcacctgtagtcctacctacttgggaggctgaggtgggaggatcacctgaccccaggaggtcgaggctgcagtgaaccatgattacaccactgcactctagcctgggtgacagggtaaaaccctgtctcaaaaagaaaaaaagaaagaaagagaaaaaggacacttagttaaatttaatttcagataaggaattattattattattattgttattagaaacagagtctcgctctgttgcccaggctggagtgcagtggcacgattgaggctcactgcaacctctgcctcccgggttcaagcaattctcgttcctcagcctcccaagtaggtggcagtacagatgtgcagcaccacaccggtcaattttggtatttttagtagagataggattttgccatgtt[133 bp omitted]atataattatacaacaaaatttagctgcttatttgaaattcaaatttaaccgtgtgcatgtatttttatttgcgaaatctggcagccttgcccgttcttccgtagcagttccagacagccacggccacctggtcctggtcctcgggagtaccgacacaactgccaccctaaagggcaccaggaactctacctccatcagctcgcagatggtcaccgtggcagctgtctctaaggagggtgttcactcctcttccacagatgacaaaactgagactccaagaagccaagtgacttgtgtaaggacaaacggtaaccaaggcgcaggggaagcagccagcctttgccagtctgactccaaagttcaagttctatgtacaccccaggtagcttggcaaaccacccacttctcgaacaggaaggcctcaaccctgccgttcacaaaggaggaaaaagacagtgtgtgcaggcccccaggcacaggacagacaagattcggtgctagaatattcaaagtgattttgaaacccagcgcctcttagtaataacaataccagtttcggtcatttgcataactttctaccgttaacaaaaggtatcccc[137 bp omitted]ccatctctactaaaagtacaaaaaattagccgggtgtggtggcacatgcctgtaatctcagctactcgggagctgaggcaggagaatcgctgcaatccgggaggcggaggttgcagtgagctgagatcgcgccactgcactccagcctgggcaacaagagcgagactccgtctcaaaaaacaaaacaaaacaaacaaacaaaaaaagaaggcagatgggagagagaatggtctgtaggatccctctgcagaccctgggacgtttcctgtgctcccactggacatggctggggtgggtgggtgggtgctgggcagatccttctgggccaacttccaggagcttctagatgagggtcctgaagtcacaggctctgagcgtgggtctgggcagcgcacagagggcttgggtcccagtggccagttccagctctgcctgcaggaccccagtgttggcgaacatgccatcggttacagttcctgacaccacctgctggactggattccaggcggtgtaaaccagtctctgctctcagggagggtctgaaagacgacggatcctttgagggagggaactgggagcccaggccctcaagatgggttaggagtaaactggaggggaggggcttgggacacctgccgggggagtccagggtggggtaagacgctggagaaaatatgatcaaaatgagacttatgtaaatcaaatctcgtttggttgcagatcttttactgctgttttgatctgccattggcagagactgctgactacttgggcttttgagtttttcttcccctttttacgtgccatgtggggcagggggcgggaggaggtggggtgccctttaggccaccaggttttgtttttgttttttgagacagagtctcgctctgttgcccaggctggagtgcaatggcgtgatcttggctcactgcaacctccacttcccgggttcaagcgattctcttgcctcagcctcctgagtagctgggactacaggtgcgtgccaccatgcccggctaattttttttgtgtgtgtgtgtttttagtagagatggg[147 bp omitted]tttttttttttttgagacagggtttcactctgtctcccaggctggagtgcagtggcacgatctcacctcactgcaacctccacctcccgggttcaagcgattctcctgcctcagcctcttgagtagctgggattacagacacctgccaccacacccagctaattttttatttttagtagagacggggtttcaccatattggtcaggatggtctcgaacttctgacctcaggtcatctgccacctcggcctcccaaggtgtgcttacaggcatgagccaccacacccggccttaggccatcagggtttaaggagtgccaggaaactgttaaaggaaccttgggggatctttcagaaatatttaaaaaaaagatgaggctgtggatatgcctccccacccctaccctctagtttcttcattgaaaattttagttttttttccttgccc[137 bp omitted]catggtgaaaccccatctctactaaaatacaaaaattagctgggtatggtggctggtgcctgtaatcccagctactcgggaggctgaggcaggaaaatcgcttgaaccggagaggtgaaggttgcagtgagccaagattgcatcactgcactccagcctgggcaacaagagcagacactccatctcaaaataaataaataaaataataataataatcatcaaagtgtaggtatgtgtcagaggtggtgggaagagaggacgtgagaagatgtacttatatgaccacagattaaaattttttatttcaaatttgctgcaaagggagataatgttggaaaaatccagttcagagattcccactggatagaaacatttgatatgaaaaaaatatattagataatcattgtcaaacaggatttttaaaatctaagtaaagatcattagactgtttgcaaaatggaaagctggttgtataactgcccaaggggatcaccttgcccgctgcctagacagccgattcatcaagacaggggaattgcaacggagaaagagtaattcacgcaaagctggctgtgcaaagaccagagttttttgtttgtttgtttgtttttgtgacatagtttttgctcttattgcccaggctggagtgcaatggtgcaatctcagcttactgcaacctccacctcccgggttcaagtgattctcctgcctcagccctcccgagtagctgggattacagacgtgcatcaccatgctcggctaattttttttttatttttagtagagacagggtttcaccatgttggtcaggcctgtctcgaactcctgaccacaagtgatccacccaattcggcctcccaaagtgctgggactacaggcgtgagccactgtgcccagcctgtttgcagcagttttgtttaatagctctaaactggaaataggataattgataaataaattgtagtatatttgctatggtctgagtgtgttccccaaaattcatgaattggaaacttttttgtttttgtttttgagatggagttttactcttgtcatccaggctagagtgcaatggtgtgatcttggctcactgcaacctctgcctcccgggttcaagagattctcctgtctcagcctcccaagtagctgggattataggtgcctgccaccatgcctggctaatttttgtatttttagtacagacagggtttcaccatgttggctaggctggtcttgaactcctgacctcatgtgatctgcccacctcggcctcccaaagtgttgggattacaggcatgagccaccacacctggtgaattggaaacttaatcctcaatgcaacagtgttgggaggtagggcctagtgggaggtgtttaggtcatgagagctctgccctcatgaatacataaatgctgccattaaaagggctcacagaagtgggttctgtcctttcactcttctgacatgtgagaacacagcatttgtccctgcttgacttctgctttctgccatgtgaagacacagcaagaaggcccacaccagatgccaccaccttaatcttggacttcccagcctccagaactatgagaaataaatttctgtttcttataaattatccagtctcaggcattccactgtagtagcacaaacggactaaggcagtatttgtatctaaaaggctatctagagctgggtgtggtggctcacacctgtaatctcagcactttgggaggccaaggcaggtgaatcacctgaggtcaggagttcgagaccagcctggccaacatggtgaaaccccatctttataaaaatacaaaaattagccaggcatggagcacacacttataatctcagctactcaggaggctgaggcaggagaattgctggaacctgggaggcggagg[132 bp omitted]aaggcaggtggatcacaaggtcagg[134 bp omitted]agcctcccgagtagctgggactacaggcgcctgccacctcgcccggctaattttttgtatttttagtagagacggagtttcaccgtgttagccaggataggatggtctcgatctcctgacctcgcctcggcctcccaaagtgctggaattacaggcgtgagccactgcgcccggccaaggtcaggagttttgagatgtgcctggccaagatggtgaaaccctgtctctactagaaatacaaaaattagctgggcatggtggcgggcacctgtaatcccagctactcgagaggctgaggcaggagaattgcttgaacccgggaggcagaggttgcagcgagtggagatcttgccactgcactctagcctgggtgacagagcaagactccgtctcaaaaaaaaaaaaaaaagaaaaaatttttaaaaagatctgaatcaggtaacaatgtggatgaatctcacagatatccttgagagaaatacatatacacagtatgattaatacagacgtagtatgatgcctttacatgaagttcaaaaagacgaaaatttcatttacggtgttacaagtcagaagagcagttacccgtggtctaggagactttctgggataaagagaatctgttgttttttttttgagacagagtttcactctgttgcccaggctggagtgcaatggcatgatcttggctcagcacaacctctgtctcccaaattcaagcgatcctcctgcctcagcctcccaagtagctgagattacaggcttccgccaccaagcctggctaattttttttttgtatttttaggggtttcaccatgttggccaggctggtcttgaactcctgacctcaggcgatccacccgccttggtatcccacagtgctgggattacaggtgtaagccaccgcgctcagcaaaagattcttttgtatcttgatctgggtggcggttacactgtatagtaggctgaataatggactccaactatattgggtcctaaactctagagcaggggtccccagtccctgggccgcggaccactaacagtccctggcctgttaggaaccaggcctcacagcagtaggtggagtggtgggccagcaagcgaagcttcatctgtatttacagctgctccccatcgatcacatttctgcctgagctctgtctcctgtcacatcactggggccattagattctcatagtagcacaaaccctattgtgaaccgggcacgcaagggatctaggttgcgcgctcctcatgagaacctaatgcctgatgatctgtcactgtctcccatcacccccagatgggaccatctagatgcaggaaaacaagcttagggctcccactgattctacattatggtgaagtataatgatttcattatatattacaatgtcataataatacaattaaagtacacaatcaatgtaatgtgctttaatcttcctgaaaccatcccccgcatcacccgtcacccatccatggaaaaatatgtcttccacaaaacaggaactggtgccacaaagcttggggagtactgctctagagtctgtcaatgttaccctatctgggaaaagggtctttgcagatgtgatagctaaggatcttgagatggagagcttatcctggatgacccggatgaatctaaatgcaatcacaggtgtcccataagagagaggcagagggagatttgagaagacagaaggagagaaggtaatgtgaagatggagagagattggagcgaagtagacacaagccaaggactgccagcagccagcagctagaagaggcaaggaagggactctcccagagccttgaagacagcatgaccctgctgacacctccatttcagtcctgcgataccaacttcagacttctgccccccaggagagaaaacattcgagagaatacgtttatggttttggttgtttttttctttttttgagaccaagtttcactcttgttgcccaggctggagtgcaatggcgcgatctcagctcaccaagcgattctcctgcctcagcctccatagctaccatgcccggctaattttgtatttttagtagagacggggtttctccatgttggttaggctgatttcgaactcccatcctcaggtgatccgccggcctcggcctcccaaagtgctgggatgaaaggcgtgagccactgtgcccggccatgtttatgttgttttaagacaccaagtttgggatagtttgttatatcaaccgcaggaaactagtacacacaggtgcatatatatacagaaaaattcactgagctgggcgtggtggctcgcacctggaatcccagcactttgggaggctgaggtgggtggatcaccagaggtcaggagctcgagaccagcctaaccaacatggtgaaacttcgtctctactaaaaatacaaaaattagctgggcgtggtggtgggcgcctgtaatcacagcttctcaggaggctgaggcaggagaatcacttgaaaccgggaggtggaggttgcagtgagccgagatcgtgccattagaaaaaaaaaagaaccagctcattagcacgggcttagtgcccagaggcccaagttcctgcagcactggtagtggtgaggcctcctcctctggccacaaccaggtcatcaaaattggggctgtcagggcagttgggatagagggacacagctccccagaatcctaatctccctgtcctgcctcctgctcttaggatcccatgtacttttccagattttcgtggaccctgtgaagagcgttaagtcctcaggagagctcctct[136 bp omitted]ctcctgagtagctggcactacaggcggccgccaacacgcccggctaattttttgtactttattttttatttatttatttttcttgagacggcgtctcgctctgtcgcccaggctggagtacagtggggtgatctcggctcactgcaagctccgcctcctgggttcaagcgattctcctgcctcagcttcctgagtagctgggactacaggcacctgccaccacgcccagctaatttttatacttttaatagagacggggtttcaccatgttggccaggatggtctcgaactcctgaccttgtgatgcacccgcctcggcctcccaaagtgttgggattacaggcatgaaccaccgcgcctggcttgtacttttttagtagtgacgga[136 bp omitted]gcttctcctcttctggggcgaacccctcaagtcttaactcctcagaggggtcagagtaagattaaataccaattgcccaggcttcatcggcttttcttccctgcctcagtttccccactgccttacttgtgtttccttggattacctcccaaataaactatccacaaccaagtccttgtttcagggtctactttggggaaacccacactaaatctaagtctcagacgctggggaggccctggttctgtgtccactcctgaagctggggtctggggtcagttcccctctgccctgggtttcaaggctccaagatctcagtttgctccaggtttctccc[131 bp omitted]tggccaatgcggtgaaatcctgtctttactaaaaatacaaaaattagccaggcgtggtggcacgtgcctgtagttccagctacttgggaggctgaggcgggagaattgcttgaacttgggaggtgggggttgcagtgagccgggattgtgccattgcactccagcctgggcgacaagagctaaataatgtctccaaaaaaaaaaaatacatatatatatatatatttatatatacatttatatatatttatatatatatttgtatatatttatatatattcatatatatttgtatatatttatatatgtatatatgtatatatttatatatatttatatatttatttttatatatttatatatttatatatataaatgtttatatttatttataaatgtttatatatataaacatttatatatttctatatataaacatttatatatttctatatataaacatttatatatttctatatataaacatttatatatttctatatataaacatttgtgtatttctatatataaacatttgtatatttttatatataaacatttatatatttatatatatatatgtaaaacatctcttaaacctaactcactgtttttctctttaaacatgttttcccccagacatccttcttctgccctcactcactccccggaggagccacatgttcctctctcacctttgctcagcctgttcctccctcttaccttctccaggaaggtggggatgctctgggcctcctggtttcttggtgagggcaaggagggctctgcagctcccccagtcccaaggggctgtcaggacaaggtcagcccagtagaggcagctaatctgggcttggggagttgggacaggggagcttacacgcacaggctcacacagtgcatatatacactgtgtacgtgcccatctgcgcatacatgggtgtctgcacgcatgtacaggcacacatgggtgtgtataggcacatacagcacacaagaggatgtgtgtgcaccacgggcatgcatgatcactcacaggtacacatatgtctagctgcaaacagatcccctgggagaactttgaccagcccagcgatgggtgtagtgagctgtgcagggagattgggggagagaaaagagaggggaggagaggggagggaatccaggagacaaggtgggtggagaggttgggttgcagttgggaatcccaggagctacactggcttcagttcccttcctgggaactcagtgtctccctggggctctgcccaccagcagaggcatttggggtcaagaaaatcaatgccattctttttgagtgatggggtcagctggttgtcggtggacactggggttatgtagatgcatgtccatctacttgggccagaccacgccatggcctcccacagcctctgtgcagtgaccatgcctgcaggcagcggggtggaggacccttccattggtctcccgtgtcccttcctgaaccactggcttcaccttctgtactccctgcccagcgcctggcctgactcctactgatagcctgcccctggctttggctccctccttgaccatgattcccactcacccaataattagcttgtatcccattaaccttgaccaggcccagaccacatcccaggagctggtttctgggtttgtctaggaccactagtgggacccaggctggaagaagttctcatgcttatggggacagaattagggaaggaattcagaaaagctgaggcagagagaagccatttataattaatagctcaggacaaaactgcgggcagaattagactgagttttgttttttgtttgtttgtttgttgttttgagatggagtttcgctctgttgcccaggttggagtgcaatggcgcaatctcggcttactgcaacctccgcctcccagattcaagcaattctcctgtctcagcctccagagcagctgggattacaggcgcctgtcgggctttttttttgagacagagtcttgctctgttgcctgggctggagtgcagtggtgtgatctcggctcactgcaacctccacctccgggtttaagccgactctcctgcctcagcctccccagtagctgggattacaggctgatgccaccacacccagcccgcgccgggctgtttttttgtaaagacagggtttttccctgttgtccaggctggtctggaactcctgacttcaggctatctgctggcctcggcctcccaaagtgctgtgattacaggaatgagccactgcgcctggcctttttgtgttttttgagacagggtctctctatgttgctcaggttggggtgcagtggtgccctcctgaggagtagctgggaccacacacatgcaccaccacgcctaatttttttttttttttgagacagagtcttgctctgttgcccaggctggagtgcagtgacgtgatcttggctcactgcaatctctgcctcctgggttcaagcgattctcctgcctcagcctcccgagtagctgggattacaggtgcccaccaccacgcccggctaatttttgtatttttagtagagacagggtttca[139 bp omitted]tgccccggcgggtctcgaattcttgggttcaagtgatgttccagcctccacctcccaaagtgatgggattacaggagtgagccatcgtgcctggctggatattttcaagcattacattaaaaaaattctccacttacaagtcagtgtttcagaaacagcccccaggctggtcctgttactcgcagctgttatctcaacattcttggaggcctagtgggaggatggcttgaggctaggcgtttgagactagcctgggcaacatagcaagactttgtctctacaaaacaattaaagaatttagcctggcatgctggcacatacctgtagttccatctacttgggaggctgaggcaggagaatcgcttgaggccatgagtttgaggcggcagcgagctatgcttgtgccaccgtgctctggattaggtgacagagtgagattctgtctccataaaaaaaaaaaaaaaaaaaaattaaggctgggtggggtggctcattcctgtaatcccagcactctgggaggccaagtcaagtggatcacctgaggtcagcagttcgagacaagcctgaccaacatggcgaaaccccgactctactaaaaatacaaagattagccgggggtagtagcagcacacacctgtaatcccagctactcgggaggctgaggcaggagaatcacttgaacccgggagggggacgttggcagtgagccgagatcatgccattggcactccagcctgggcaacaagagcaaaactccgtctcaaaataaataaataaataaataaataaataaataaataaataaataaataaaaagggcagtgatgtttatgtcaacacagcatgagctctgagcaaggccatctgtgggacacgtcgcacaaggcgtgccacaaaactaacacctgacaaatgagggctgctttccctcctcctgtctggcccatggcagattgcaggcgccactggttagcctgagtcacggcaattgcaaatgcaccaacttggccagattggctgtcagactggatttttaaaaaaatctagattcatgctgtttataaaagacacacatcaaacaaggatatggaaggctgaatgtcaatggctagaaaatactcaccaagagaaagctagtgtatctatattcgtatcaaactaaatagtatttaagacaaacaatagttatcagggaaaacaatagtgtttacatcataattacaggaacaagctactaagctgaagcaacctcagctgggtgctgggactacgcctgtagtcccagctacttaggaggctgaggcaggattgcttgaggccaagagttcaaggccagcctgggcaacataaggagacctcgtctttctctctctcaaaaaaaagtaaggtgaaacaattctcaagttgtattatctaataatatatgttcaacacatataaagcaaatgtcaagtgaaaagacagcccacagaagaatgggagaacatttttgcaaatcatgtagctgata[131 bp omitted]gcaaacatggcgaaaacccatctctactaaaattacaaaagttagctgggtgtggtggcacgtgcctgtaatcccagctacttgggaggctgaggcaggagaatcacttgaacccgggaggcggaggttgcagtgaaatgagatcttgccactgcactccagcctgggtgacagagcgagactctgtctcagaaaaacaaaaacaaaaaccaaaaaaaaaaaaaaccaaaaaactcttacaactcagcaataaaacccaaataatccaattttaaaatggccaaaagatttgaatatacatttcttttgtttgtttgtttgtttgtttgttttttgagacggactctcgctctgtcacccaggctgaagtgcagtgccgccccgcgatctcagctcactgcaacctccgtctcccgggttcaagcaattccctgcctcagcctcctgagtagctgcgattataagcacccgccaccatgcctggcaaatttttgtattttttgtagagacagggtttcaccatcttggccaggctggtcttgaactcctgacctcctgatccacctgcctcggcctcccaaagtgctgagatgacagccgtgagccaccgcgcacggccttgaatagacatttctttctgaagaagatataacatcataaatgatcagggaactgcaaatcaaaaccacagtgagataccaattcacacccactaggatggctagaataaaaaagagaaataattttttaaatgattgcaaagatttgaagaaatcaaaaccctcgcaggctgctggtgggaatcaaaacaggtgcagcgtctttgggaaatagtctggtagttccttgagcagttaaatgtagatttgccatttgctctgacaattccccttctagggatatacccagtaaattgaaaacatgctcacacaaaaactttgacatgaatgtttgtagcagcaattattcgtaatagcaaaaaaatggaagcaactcatctgtccaaccaaagaatggctcaacaaattacggtgtattcacacagtggaatatgattaggccacaaaaaggaatcatactgacgtgctgtaacatggatgaaacttgagaacatcttggcaagtgaaaagagccactcttttttttttttttttttgagaaggagtctcgttctgtggcccaggctggagtgcagtggcacaatctcgactcactgcaacctccgcctcccaggttcaagcaattcttctgtctccacctccccagtagctggaactacaggcgcccaccaccatgcccggctaatttttcatttttattagagatggggtttcaccatattggtcaggctggtctcgaactcctgacctcaggcgatccacctgcctcagcctcccaaagtgctgagattacaggcatgagccacacacccagccaggagccactcttaaaaggccagatattgtataattccattgatatacaatgtccagaacaggcaaatccacagagacagaaagtaggttggccgttgccagggtcagggagggaggaaaagttgggggaaggtagagagtgactgctaatgggcacagggctttttttgaggtaatgaatttttttttttttttttgagacggagtctccctctgttgcccaggctgaattgcagtggggtgatctcggctcactgcgacctccgcctcccgggttcaagagattctcctgcctcagcctcctgaatagctgggactacaggcacctgccaacacacctagctcatttttgtatttttaatagagacggggtttcaccatgttggttaggctggtctcgaactcctgagctcaagtgatccacctgcctcggcctctgaaagtgctgggattacagacatgagccactgatcccagctgaaaatgttttaaagttgattgtggtcatggttgtaccgacctgtgagtatgccaaaaaacattgaattgtacaccttaaatgaacatggtatgcacattatatttcaataatgctgatatatatatggaatcacatagtatctggccttggctgtgtgcagtggctcatgcctgtaatcccagcactttgggaggccaaggcaggcagatcacctgaagtcagtagttcgagaccagcctggctaacgtggcgaaaccctgtctctactaaaaaatatacaaaaattagctgaccatggtggtgcatgcctgtaaccccagctacttgggaggctgaggcagggagaatcacttgaacctagaaagt[136 bp omitted]caaggttcattcaaatggtagcatgttgcagtacttcattcctttttatgcccattccattgtgtggatacatcagaagcacctcaatttgtttatctattcttcagttgggcgtacgaggtgcttccactttttttttttttttttttgagataggatcttgctttgtcacccagtgtcatagctcactcactgcagcctcaacaacctcctgggctcaagggattctcccatatcagtctcccgagaagctgggactacaggtgtgtaccaccatggtcagctaatttatttttatttatttttgagacagggtctcactctgtcacctggctggagtgcagtagtgtgatcatggctcactgcagtcttgacctcctgggctcaagcaatactcccatatcagcctcctgagtagctgggattacaggcacctgccaccacacctggttaatttttgtattattattattattatttttgagacagaatctctctgtgttgcccaggctggagtgcagtggcacgatctcagctcattgcaccctccgcctcccaggttcaagcgattctcctgcctcagcctcccgagtagctgggattgcaggcgtgcgccaccatgcccagctaatttttgtatttttttagtagagacggggtttcaccatattggccaggctggtctctaactcttgacctcgtgatccacccaccttggcctcccaaagtgctgggatgacaggcgtgagccaccgcgcctggcctaactgttgtatttttagtagagacagggttttg[141 bp omitted]gcattcttgctggtgatttgcggtcttgggcttctgggccaagcggagctctgccttggacgcatgcgcagcagatgatggcccgtgttttttgtacgtgtgtgttttgcattaaggaaggaaagtgatgaccttcacgggtcagcatctttccctgagtctcctctcttaaatgaatacttgagatcccaagtggcttatcatgagttttcctctatatcaagggtctgtgaactctggcctgctggaagcatggctgatggcctgttttttttgtttttttttggcccctgaactaataacggttttcacatttgtttgt[132 bp omitted]tctactaaaaatacaaaattaacagggtgtagtggcaggcacctgtaatcccagctacttgggaggctgaggcaggagaatcacttgaacccgggaggaggaggttgcggtgagccaagatcgcgccattgcaatccagcctgggcaacaacagcgaaacatcgtctcaaaaaaaaaaaaaaaaaaaaaaaagaaagaaagaaaagaaaaaaagaaaaaaaaaagattgatttccccacctccccacctcttccacgagttccccaagccctgcaagatgacttcgatgggatacaattgtttccacctcatcacagcagaatgataatgcctatagcctgtcaatggcaagttctcgaatgtgtgggcaccaggaacacaccccggaagccacatgtccttgccccaagggaagggccctggagagcagaagagaggaggaaagttgagcctcttccccttttccgtcctccttcctcctgccctgattctgcccacagaggaagggtctgagctagaggaacctggacagtgaatccacaccctatggacagatgagaagaccgaggccagagacaacgcagggtccggcccctggtcctatgcctgatgcctctcactggagacccctcccccacttcaaggtcgcccctagaaggcaaacgctgaagccaagtgttcttggagcgtctcttggtggacgcttcggccctgccacggaacggccccttagtgaaggttctcagcttagacttcagcgccacctggtggccaccgggcatcagacctgggacttgcctcgagggctgccagaaacttgagtttgtccactcacatcactgcatcccgtggagaagtcccagtgccgacctgcttgcttgcttgcttgcttgcttgcttgcttgcttgcttgctttctctttccttcttccttccttccttcctttcctttcttttcttttttctttctctttttccctccctccctcccttcctctccttctctctctctgtctccctccctcccccctccctcccttctctctctctctgtttttctctctctctgtctctcctgccttcccgctttctttctttctttctttttttttgtttttgagacggagtctcgctgactcccatgctggagtgcagtggcgcgatctccgctcactgcaagctctgcctcccgagtagctgggactacaggcgcccgcctccacgcccggctaattttttgtatttttagtggagacagg[148 bp omitted]tggagtgcaatgacacgatcttggctcactgtaacctctgcctccagagttcaagtgattctcctgcctcagcctcccgagtaactgggattacaggcgcccatcaccacatctggctaatgtgtgtgtgtgtgtgtatgtgtgtgtgtgtgtgtgtgtatggaatttcgctcttgttgcccaggctggagtgcaatggcacgatctcgctccctgcaacctccgcttcctgggttcaagcgattctcctgcctcagcctcctgagtagctgggattacaggcttgcgccaccatgcccagctacacctgtaatctcagcactttgggaggccaaggcgggcaaatcacctgaggtcgagagttcgagaccagcctagccaacatggtgaaaccccgtctccacccaaaatacaaaaattagccgggcgtggttgtgggtgcctgtaatcccagcttctcgggaggctgaggcaggagagtcgcttgaatccgggaggcagaggttgcagtgagtcgagatcgtgctattgcactccagcctgggcgataagagcaaaactctgtctcaaaaaaaaaaaatatatatatatatatatatataatctttgtgtatcaatcttgtatttgcaaccttgctgaatgcacttattagttccaataatcttttagtggattccttaggcttttctatatacaggattatacttgcttatatttgcttcttccttttccatttgggtactcttttatttctttttctgtcctaattgccctggctggagcctgcagtacactgttgaatagaagtggtaggagcagacatccttgtcttgttcctgactttggagagaaagtgttcagtctttcatcattaagtatgatgctagctgtgggttttttataggtgccctgtatcaggtggaggatgttcctttctattccaatttgaaagttttatcatgaaagggtgttggattttgtcaaatgctttttctccatctattaaatgataatgagattttttttttctttcttttttctttttaatacagtctcgttctgtcacgcaggctggagtgcattggtacaatcatggctcactgcaacctccgcctcctgggcacaagcgattctcctgtctcagcctcctgagaagctggaatcacaggtgtgccaccatgcctggcttgtttgttattttattgatgtgatatactgcatttattgactttcagatattaaaccaacctggcatcccatcccagggataaatcctacgtgatcatggtgtatcattcttttttgtttgtttttgttttttgagacggagtctcactctgttgcccaggctggagtgcaatggcacgaactcagctcactgcaagctccacctcctgggttccagcgattctcctgcctcagcctcccgggtagctgggattataggtgtgcaccaccatgcctggctaattttttgtatttttagtagagacagagtttctccatgttggccaggctgatctcaaactcctgatctcaggtgatccactcgcctcagcctcccaaagtgctaggattataggcgtgagccaccatgcccggcctgtggtgtatctttttattattattattttttgagacagagcttcactcttgttgcccaggctggagtacaatggggtgatctcagctcactgcaacctccacctcctgggttcaagtgattctcctgccacagcttcctgagtagctgggattacaggcatgtaccaccatgcccagctaattttgtatttttagtagagatggggtttctccatgttggtcaggctggtctcgaactcaggacctcaggtgatctgccctcctcgacctcccaaagtgctgggattacaggtgtgagctactgcgtctggccaggtgtatcatttttataataatagaattcttattattgttttaagcccctaaattttggggtaatttactaagcagcaacagacaactagctcaagctgcctgttatgggaccacagccgtcgccttgcttccttagctcccaggtgagtgtagtcaagatggaggcagatgccttcttgggggcctgctctcttggctgtaagggccttttctttccagtggcttgtggtgagatggtctaacctggagctggggccagggactccctcttctgtctggtgaaatgggtgttgcagctgcagccaggagcatagggaggcagagctgggacagagcctgagcttgtcccctgggtcttcaggttctttctttggtagtgagagttgaggctggagtctcagctgtgccctcccgtggccttcacttatggttagctacatgtgggaaacagatgttgcctattcacatgaggggtctaggttgcctcctggaaaaaagaattcaccccaaataaggagagaaagaggtcctcagccttggttggtgcaaacctctggtgctggagagcagagtgatgcggtttgtagcactggcccaccgtgcgggttgtcctctgctccttggtccttagtctaaggaaagggagagggggtgtcaacactacaaccctggatccctgcaagacactggctgccccacagagatgcccctgtgtacagagagcatccaggggccatgcgtttgaaagactgttccaagtgaatgcaagattttctttttcttttttttttctgagacacagtctcgctctgccacccaggctggaatgcagtggtgcacgatctcagctcactgcaacctccgcctcccaggttcaagcaattctcccaccttagcctcttaagtagctgggattacaggcacatgccaccacacctggctagtttttgtattttttagtagagatggggtttcaccatgttggtctggctggtctcaaacttctgacctcaggtgacccgcctgccttggccttccaaagtgctgggattacaagcgtgagccaccgcacccagcccatattttcgactggggatacagttctagctattttactgatgtaggccagagcatcctttgccgaaattcagagcctattactcccaggctggtgaggctgatggcctgagaagctagatttattcactcattcagagcacctgttttgtcttcctgctctctacaaggcctgggtcagcgggaggcagaaaggcctcctttccctcgagagcctcactgaccagtgaaggagacagaaaatcctaatgatgagcagtaagtgtcataataaagataagccaagccaaaaggcttagccaagcctggcagcttcctggaggaggtgatgtgtgaagtttgcactagtaggaggtggcatcaacaggcccatggggtgagtgttgaaagttcagaaagctggggatggagggagtttggagcattctctttctccttttcatctatctctgtccacttcctctttccctttccctgcttctcttttcccagcttcccctcagtttgccaggccctctcattccaatctctgttcccagttttggcccactgctcaccaaagctaggtccctaataactgtgggtccctat[198 bp omitted]cacgcccagctaattttttgtattcttagtagagacggggtttcacc[138 bp omitted]gcaaactgggcctttgcaggcacaaattcctgacctttctggcgtagctacatccatgtggcacccacagtcctgagctctggagctgtgtggaaagcacacatcatttgcacattttgtttagtttcaaagcattattttttatttcattttatttatttatttgagacagagtctggctctgtcacctagggtggagtgcaatggcacgatctcggttcactgcatcctctgcctcctgggttcaagtgattcttctatctcagcctcctgagtagctgggattacaggtgcacaccaccaagcccgcactcatttttatatttttagtagaggtggggtttcaccatgttggccaggctggtctcgaactcgtgacctcaggtgatctgcctgcttcggcctcccaaagtgctgggattacaggcatgagccacagcacgtggtgtattttttatttttatttcttcatttatttagagacagtgtctcactctgtgctccaggctggagtacggtagtgcgatcatggctcactgcaccttcaaactcctgagcttaagcaattctcccacctcagcctcctgagtagctgggactacaggtgcatgccaccatgcctggctaattaaaaaaaaaatttttttttgtagagacaatgtcttgctatgttgcccaggctggtctcggaactcctgggctcaagcaatcctcccatctcagcctgtcaaaaagctgggattacaggaatgagccaccatgcccagccagcattattttttttctgattataaaagctatatatcaggctgggtgcggtggctcacacctgtaatcccagcactttgggaagccaagggaggcaggtcacaaggtcagaagttcgagatcagcctgtccaacatggtgaaaccccatctctactaaaaatacaaaaactagccgggtgtggtggtgtgtgcctgtaatcccagctaccctggaggctgaggcagggggattacttgaacccaggaggcggaggttgcagtgagcctagatcgcgccactgcactccagcctgggtgacagagcaagactccgtcttgcgggggggagggtggaaaaaggtatacatcccactgctttttcttttcttatattattactatgcaagcgacacactgcagaaaaattaatatacacagataagacagggaggcagtacagcagagaggatgggagcacagagttcagagctacatggggcactgacttagcttccttgtgtctcagtttcctcgcgtaaaaagtaagtataagctggtcatggtggctcacgcctataatctcagcactttgggaggccgagatgggaagatcacttgagcccaggagtttgagaccagcctgggcaacatggggaggccccctctttaaaaaacaaaataaaaaataaaaaattagccaaatgtgatgttgcacacctgtagtcccagctactcaggaggctgaggtgggaggatcgcttgagccgaggagggcaaggctgcagcgagctatgactgcaacactgaactccaacctgggtgacagaaagagtccctgtctctgcctgcccccgccaaaaagtaagcataatgagaattttttttttttttgagatggagtcttgctctgttgcccatgctggagtacagtggcacgatctcagctcactgcaacctccacctcccaggttcaagtgattctcatgcctcagcctcctgaacagctgggactacaggtgtgcaccaccaagcccagctaatttttgtatttttagtagagatggggtttcaccatattggccaggctgatctcgaacttctgacctcgtaatccacctgcctcggcctcccacagtgctgggattccaggcgtgaaccaccgcacccagccagcataatgatcatcgccaattaacaggcactcagcacatggtatgtgctctgttagtgtttgctattgttattactggcatgtaatgatagaaaaaagaaataaaggaaaaaagtttacctatagttctatgagcctgagataagtacactgttaagcctttgagatatagccttccacactttcactatatgaacatactttataaatatggccagttccacaatgtggtctaaaatatgatcataactctaattttcccaattaattgttcatgcttgtgtatgccttattattattgttattattttagacggagtctcgctctgtctcccaggctggcgtgcaatgtcgcaatcttgccccattgcaacctctacctcccaggttcaagcaattctcctgcttcagcctccgaagtagctgggactacaggcatgtgccaccatgcccggctaatttttgtatttttagtagaggcgtggtttagtagaggctggtctcgaactcctgacctcgtgtttcaccctccttggcctcccaaagtgctgggattacaggtgtgagccaccacgccgggcctgtgtatgccttattaaaaagaaatccagggccaggtgtggtggctcacgcctgtaatcccagcgttttgagaggtcgaggcaggtggatcgcttgagcccaggagatggaggctgcagtgagctgtgatgactgctactgcactccagcctggttgatagagtgagaccctgtctcaaaaaaacaaaaaccattcaggatcttgagaccaccctgtatcacccagaaacttttgagagcctacaccatgcggggcataggtcatgactgctatttcccatcatgaccacatggtgtcgccattgaaacctggttgtaaccagtccccaggacttggtggtaacgatgctttttgaaatcgtgctaacctcagcgagaagggttctaggcttgagatgtcaagcttgctgttctcagggttcagtggctgtatttcctgcacactttccaccatctagggtgactcctagctccaggaggcctgggttaggacagcttctgacatctgccaccttctagatctagaacctaaaattttcccttcctctttgggaatccataccaggagctcgtttcagccctgcaagcatcaaggctgagaggtggttagccatctgcgaagacatggtctgcttatcccgtggccactttctttttttttttttttttcgagacgaagtcttgctcttgtctccccaggctggagtgcagtggcacaatctcggctcactgcaacctctgcctcctgggttcaagcgattctcttgcctcagcctcccgagtagctgagattactggcgcctgccaccacgtctggctaatttttgtatttttagtagagacagggtttcaccatgttggccaggctggtctcaaactcctgacctcaagtgatccgcccgcctcagcctcctaaagtgctgggattataggcatgagccactgcgcccggctaccctgtggcccctttctttcccattcttcctcagagacagaggcagacttccctggcacccaccttcccagcttctcctgcagacgtggcaccgacatgtgactcaacctggccagtgggctgtgagggagcaccagcaggggaatttctagggcagattttcctccctaataaatacacatgaacacatttcaggatgaatctcctaccttcttatatgtgagacgacaagcctcaagatggagactgtggtagccagcctgcaagaagatctcgtggcagggcgtggtggctcaggctggtaatcccagcactttgggaggctgaaacgggtgtatcacctgaggtcaggtgttcgagaccagcctggccaacatggagaaaccctgtctctactaaaaatacaaaaattagccgggcgtggtggcaagtgcctgtaatcccagctacttctgggaggctgaggcaggagaattgcttgaacctgggaggcagaggttgcagtgagctgagattgcaccactgcattccagcttgggcgacaagagcaaaacgacatctcaaaaacaaagcaaaacaaaaaaaaaattggcttgaataaaatacataaatcttctttttttaaaaaagatctcccgcaagctttccctcctggtattcatgcccttccacatggaggggcagcagagagtatgggaacacagagcatagactggcctgtgtggccaatggaatgcagctgagtacagacctaggagtccaggtcaggaaagatgcaggccagacgcagtggctcacgcctgtaatcccagcactttgagaggccgaggcagctggatcacctgaggtcaggagttcaagaccagcctggccaacatggtaaaacgctgtctctactaaaaatacaaaaactagctgggcgtcgtggcatgcgcctgtaatcccagtgactcaggaggctgaggtgggagaatcgcttgaacccaagagatggaggt[136 bp omitted]aactagccaccataccgtgaggatgctcaagcagtcctgtggagggacccatctagacaggagccaacaggcagcaccaacttgcctgccacgtgagtgaggccccttggaaacagagctcccagccccagttaagactttaggggactgcagcccttcacggcaacaagagaccctgagccatagtcctgcatctcagctgctcccaaattcctgaccactgaaaaatgcaagagataaatgactactgttgtttaaagccatgagttctggggggatttgttttatagcaattaattaagtaatcaaaggccaacactataaagatttcaggggggaaagatgaaaaacactgagttttttatgatgtcatggagccactgagttaatcaaccctgaaactgcctacttcttgatttgcagtgcaagagaacgaatgaatgtcctggtttggctgctgttacttctgctgttacttgcggacaaaagcatccttattgattcatcacataaaagatgactccctggggatttctgaagagtgattcctggccgggctcggtggctcatgcctataatcccagcactttgggaggccg[133 bp omitted]gaggcaggagaatggcgtgaacccgggaggtggagcttgcaatgagccgagactgcaccactgcactccagcctgggtgacacagggagactccatttcaaaaaaaaaaaaaagtgattcctgagtgacttcctgtgaccttctttttttttttttttttgattaagggtcttgctctgtcactgaggctggagtacagtgatgcaatcacagctcgctacagcctcaacctccttggctcaagcaatcctgcaatcctcctgcctcaacctcctgagtagctgggactacaggcacaccaccaccatgcctgtctaatttttttttttttttttgcagcgatgggggcctgttgcccaggctggtctcaaactcctgggttcaaacaatcctctcaccttggcctcccaaactgttggaattacaggtgtgaaccactgtgcccagcctgtcacctcctattctgtgaggctggacatttcttttgttaaaaaaaggacataaatttaaactctgatgggagccactctggaagggtctccactaaaaatcatctcaaatgagctttttttttttttttttgagatggagttttgctcttgttgcccaggctggagtgcagtggtgcgatcttggctcactgcaacctctgcctactgggttcaagggattctcctgcct[136 bp omitted]tggcctcccaaagtgctgggattacaggtgtgagccaccacgcctggcccccaataagcttctgtatcagaattcacgagaaaaagcagccaaataagctatgactggccagttcacaagtttgtctttgatgtgttttattatttttatctgaatggaattatcctggacatggattttgtaggctcttgtttatttttcaccatcaaattctgaacgtctttcagatcaacatagactaacatcatgtacagggctgtctggtgccccattgtagggaggtaccatgatttatttattaatttaatttttttttttttgagatggagtttcgctcttgttgcccaggctggagtgcaatggcaggatctcagctcactgcaacctccgcctccagggttcaagcgattctcctgcctcaacctcccaaataactgggattacaggcatgtgccaccacgcccggctaattttgtatttttagtagagacggggtttctctatgttggccaggatggtctcgaactcctgacttcaggtgatccgcttgcttcggcctcccaaggtgctgggattacaggcatgagccacggcgcctggcctggaggtaccataatttatttaaccagcctctgaagctgggaatctagaatgttgtcactgttctgatattacaataaccccatttactttttttttaattgtggtaaaataatatagaatttacaatttagccttttttttttttttgaaacagagtcttgctctgtcgccctgactggggtgcagtgacgcgatctcggctcactgcaatctctgcctgccgagttcaagcgattctcctgcctcagcttcccaagtagctgggactacaggcatgtgccaccacgcccaactaatttttgtattttgtattttttttgacagagtcttgctctgtcacccaggctggagtgcagtgacataatctcagcttactgcaagctgtgcctcccgggttcacgccattctcctgcctcagcct[223 bp omitted]tcaggccagtcttgaactcctgacctcgggtgatccgcctgcctcagcctcccaaagtgctgggattacaggtgcgagcccctgcgcctggcctcaatttaaccatttttaagtgtaaagctcagaggtactaaatgcactcacgttgtgcaaccattaccaccctccatctgtgaaactttttcatcatccccaactgaaactctgtgcccattaagcaatgaccccatttctcactcgcccccattcagtccctcctaacctctattctacttttggtctctgtaaattcacatattctagtccaggcgccgtggctctcatctgtaatcccagtaccttgaaaggcctgaggtgggcagattgcttgagctcacgagtttgagaccagccttggcaacgtggcaaaaccctgtctctacaaaaaatgcaaaaaattagccagcatggtggcgtgtgcctgtagtcccagctactcgggaggcagaggtgggaggatggattgaacctgggagaaggaaattgcaatgagctgagattgtgccactgtactccagcctgggtgacagagccagaccttgtcattcataaataaataaataaatgaatgaataaaataaataaatggccgggcgcggtggctcaggcttgtaatcccagcactttgggaggccaaggcaggaagatcacctgaggtcagaagttcgagaccagcctggccaacatggcaaaatcccatctctactaaaaatgcaaaaattagctgggcgtggggggcacgtgcctgtaatcccagctactcgggaggctgaggcaggagaatcgcttgaacccaggaggtggaggttgcagtgagctgagatcgttccactacactccagcctgggtgacagagtgagactccgtctcaaaaagaaacaaataaataaaataaaattaaaattaataattaattaaaaaattcacttattctataaatctcatataagtagaatcatacaatcaatatttatcttttgcatctgggtaatttcactcagcatgatgtcttctttttttttttttttttttggagacagggttttgctctgtcgcccggtctggagtgcaatggcacgatcgtagctcactgcagcgtcgaactcctggcctcaagccatcctcccacctcagcctccccagtagctggttttagaggtgtgagccaccgcacctggccagttggatatattctaatgctgctctcctggctaacacctagcctccctgacttgcccaactcctgggagttctggcctcaagaacccctccctagtccctgactggctctgaaaaccaccacagcgtctctttcttgttgggtaaaggtgagggctggaccctggaaaggtcctgtttggggcagcagctgctaggtgggggctgccaaggtccccactgctgtgtggtttgcatgagtgtgtgtgagtgggggtgtgggtgctcgtgtgcccaccttctcctcatgcactcacacttgtggatgtagctctgcccactactctttggctctgagggcaggggctgagaacaaagtttcatctacatgtgctggggaaaaccccattatatttaacactcacaatacttcctccataccaagcatagttctaggcacttttcaaacatcatcgtattcaagccacaacagtcccatgaggtgtgtactatttttatccccattttatttgttttatatttatttattttcaagacaagagtcttactctgtcgcccaggtgggagtgcagtggtgcgatcacggctcactgcagtcttgatctcctgggctcaggtgatcctgggattacaggcatgcaccaccatccttggctaatttttgtatctgtatttgtattaaaaatttttttttttagtagagacggggtttcaccatg[139 bp omitted]gcccaggctgatctccaactctgaactcaagcgatctgcctgtcctggcctcccaaagtaatgggatgacattcacgagccactgtgcctggccatccccattttgtaggtgagaaaattgagatggagagaggttgagtgatctgcctgagatcctatggccagtgagcagtgagtctagctgcggagtacaggttctgaagcaggatgcgagaccgcctgcacgtgcgcatggatgatcttgaacttccccttcattcaccaactgtagaccccatgtgggtggtcaccgagacggtatgcggctgaaccaggcagtggatgccaaggacctcgtcatcatcgtcaccaccacaataacaatactctacactctgtttgtcacatgacaagctctatgttggaaacagtatgtgtatctatattagttcatcctcacaattaacccctgaaacatcgtcatattattctctttttaagacttactgagtcttgctcttgttgccgaggctggagtaccatggcgcaatctcggctcactgcaacctctacctcctgggttcaagtgattctcctgcctcagcctcccgagtagctgggattacaggcatgcaccaccacgcccggctaagtttttatatttttagtagagacggggtttcaccatgttggccagactggtttcaaactcctgacctcaggtgatctgcctgccttggcctcccaaagtgctgggattacaggcatgagccacaacgcccaacccatcttattattctctatcacaaatgagaacactggttgggcgcagtggctcgtgccttaatcccagcactttgggaggccgaagcaggcagatcacctgaagtcaggagttcgagaccagcctagtcagtatggcgaaagcctgtctctactaaaaatacaaaaaattatccaggcgtggtggctcacgcctgtaatcccggcactttgggagggcgaggcaggcagaacacctgaactcaggaattcgagaccagcccagtcagcatgacgaaatcctgtctctactaaaaatacaaaaaattatccacgcatggtggctcatgcctgtaatctcagcgctttgggaggccaaggcaggcggatcacctgaagtcaagaattctagaccagcctggtcagcaaggcgaaagcctgtctctactaaaaatacaaaaaattatctgggcatggcagtgtgtgccagtagtccgagctattcgggaggctgaggcaggagaatggcttgaacccaggaggcggaggttgcagtgagctgagattgcacagttgctctccagcctggggcgactctgtctctaaacaagaaaacaaatgagaactcggaggctcagagaggttagagacttgcctgaggcacacaactagaaagtagcaaaatttgattttgaatccaggccggtcagactgtaaagctcctacttttttgtttgtttgctttaacttttttttaaagaaataggatcttgctgtgttgcccaggttgttctcaaactcctgggctcaagcaatcctcttacttcagcctctcaagtagctgaaactataggcacgagccatcaagcccggcttctttaatgttttttaaaaattgaggtaattacattacttaaaattgtaaccattttaaaggatataattcagtggcattgagtggattcagagtgttgtgacaccatctcctctatctagttttgaaacattttcatcactctccaaggggactgtcttcccattaagcattttcctctcctcttagcctctaggaaccatttactttctgtttctgtgactatacctgtgcaggatattttctataaatggaatcatacaatatgtggccttttgtgtctggtgtctttcacttagcataatgttttctttttttttttttccgagacggagtctcactctgtcgcccaggctggagtgcagtggcacaatctcggctcactgcaacctccacctcctaggttcaagccattgtcctgcctcagccttctgagtagctgggattacaagtgcggtgccaccacacccggattatttttgtatttttagtagagatggagtctcaccttgtt[134 bp omitted]atcagtacttccttcctctttatgactggatactattccattgtatgattatgccacattttcttgacccatttatcagatgggcgtttaagctgtttccaccttttggctgttatgaacagtgctgccatgaacatttatgtacaagtatttgtttgagtctttgttttcttttcttttcttttttttttttctttttttgagacagagtgacaaagttgctctgttgccccagctagagtacagtggtcccatcttggctcattgcaacctctccctccagggttcaaacaattgtcatgcctcagcctcccgagtagctgggactacaggtgtgtgccactatgcccagctaaattttttggattttttagtaaagacggggtttcaccatgttggtcaggttgatttcaaactcttttttttttttttttgagatggaatctcaccctgtcgcccaggctggagtgcagtggcgtgatcttggctcactgtaagctccgcctcctgggttcatgccattctcatgcctcagcctcctgagcagctgggactacaggcgcccgccaccatgcgcagctaactttttgtatttttaatagaggtagggtttcaccgtgttagccaggatggtctcgatctcctgaccttgtgatctacctgcctcagcctcccaaagtgctgggattacaggtgtgagccaccgcgcccagccttgaactcttgacctcaagcgatccgtctgccttggc[135 bp omitted]atctctgccacctgggttcaagtgattctcctgcctcagcctcccgagtagctgggattacaggcgcctgccaccgtgcctggataatttttttgtagttttagtagagacagggtt[132 bp omitted]ggattggaattgcagggccatatggtaattttatgtttaacctttggaggaactgccaaactttgttccactgcggctgccttactccacattcccagcaatgcatgaggctttcaatctctccaccaacatttgttatttcctctctctctctttttaaaattatagccgtcttagtgggtacgaactgatatcttatggtggcttcaatctgccattttcctaatgacttgtgatgttgaacatttttctttctttttttttttttcccccgagatgaagtctcgctctgtcacccaggctagagtgcagtggtgtgatctcagctcaccgcaacctctgccacccgggttcaagcagttctcctgcctcagcctcctaaatagctgggattacagacacatgccaccacgcccagctaatttttgtatttttagtagatatggagtttcactatgttggccaggctggtctcgaactcccaaccttgtgatccacccacctgagcctcctaaagtgctgggattgcaggcgtgagctactgtgcccagcctgaacatctttttatgtgcttgtcggtcacctgtatatcttcagagaaatgtctgttcaactccttggcccatttttgtccccctgatgttttttttctttagagatgggatctcactctgttgcccaagctggagtacagtggcatgattatagctcactgtggcctcaacctcccaggcttaagtgatccttccacctcagcctccagagtagctgggactacaggtccatgccactatgcccggctcttcacccatttttaaattggtttgtcattttatgctttaactttttgtttagatataatttataacttatagaaagtttatcatatagcgtaaagaaactcttataatctttacccagattcatctattattaatatttgccccatttgttttcttactatacatatctaatattttttcctgaaccgtttgagaatgagtggcataaatcatggccctgtacctctagatacttcagataaggatatttacttatttacttacataaccatagttcacagatgctgatatgctatttcttcctgatccagttttatcagttgatccagtacaggagcgaggttgggatcctgtactgctcttaattgtcttattgtcttgtctctcttttttttttttttttttttgagacggagtcttgttctgtcacccaggctagagtgcagtggcacgatcttggctcactgcaacctctgcctcccgggttcacatgattctcctgcctcagcctcctgagtagctgggactacaggtgcacaccaccacacccagctacttttttgtgtatttttagtagagacagggtttcactatgttggccagactggtctcgaactcctgacctcgtgatccgcccgcctgggcctcccaaagtgctgggattacaggcatgagccaccgcgcctggcctatcttgtctctttgttgcttttaatccaaaacagtccctcagaatattttttttttttcgagacagagttttgctcttgttgcccaggctggagtgtaatggcgtgatcttggctcaccacaacctgtgcctcccgggttcaagcaattctcctgcctcagcctcccgagtagctgagattacaggcacctgccaccatgcctagttagttttgtatttttagtagagacggggtttctccacattggtcaggctgatcttgaactcccgacctcaggtgatccacctgcctcggcctcccaaagtgctgggataacaagcgtgagccaccacgcctagctccctcagtctttcttagtctttcatgactctgacatttttcaatatacagtccctttaaagaaatagtgtttctcaatttgggcttgtctgatgttttttcattttaaaaattaaaaaaaaaatttttttttttgagttggggtcttgctttgtcacccagcctggagtgcagtggcacgaacatggctcactgcagcctcgacttcccaggctaaggcgatccttcctacctcagcctcccaagtagctgggactgtggacgcacaccactacacccggctatttttttttaaaattttttatttttttggtatttttgtagcaatggggtttcaccatgttgcccaggctggtcacaaacttctgggcttggatgatcctcctgtcttggcctcccagtgttaggattacaggtgcgagccaccgcgtctggctgatgtcttctcatgatgagattccggttgtgccttcctggctggaatgccacatagatgatgctgtgacctgcgaagaccttcacatctggaggcacacgacaccctcctgcctctcacaggtgatttattttaaccccttggtcaagatgtctgattcctctactgtatagttactctttttccttttgttactaataagcaatctatcaagagatgcttcgtgaccgtgctgacaccctcccccctcactgaagtcttccccccagatttagcccccactgatgagttttgcacacaggctgtcttcttgtaggcagccccctctgctacctttgtttttccgggaaggaccttagatcctgggtaggtgctcatcctgcctggcagtcgagtgcaatgctgctgtcctggccaatgcccagccttcctcatttgccccggcttcaaggcattggttcacagtcccgtacgggcagctagaccatctcacagcaagcagcactctgggaggctcatctcatttcctgccctggaagcttcccttcctcactgcagccactgaagctgcaggctagatcaaggggaccacagagttgtccagtccccagggtgggggtgccaggagcccttgtcctccgtagcaggtctcagaggctgacgatggggaaatcgcactggtgaagctgccgtggggtcaggaggaacctgcgataagacgcccaacagttagggcaggtgctttgaggtttggagcctgggaccccacaggaagtgacttcgtgctgagctaatgttgcttcatcctggcgccagtctcaggccaagagctgcaggctggcatggctggggggatgtcagcggagtgccctgagcctgggccaggaggtctgcagggccagtccccagggccaggcaggcagtgtccccctcccatcacgcccacctcctggagcctgcccccgtggagggcctacgtggctgccgccgtcctctgctacatcaacctcctgaattacatgaactggttcatcattgcaggtgaggaggggatggctaccctgggcagtacctgctgctgtgcccaccagccaggggctgcagatccatggtggccttccagccatcacccatctttctgctcctgggcccatctctggtgttctcacctctagaggtggttttcagctgtgctcgaatcggggaggaccaactgatgttcccaatccagcctcaactaagaagggacacaggctgggcatggtggctcccgcttgtaattccagcactttgggaggctgaggcaggaagattgcttgagcccagga[147 bp omitted]attctcctgcctcagcctcccgagtagctgggattacaggcgtgcaccaccacatccggctaatttttgtattttgagtagaggaggagtagg[144 bp omitted]tctgttgcccaggctggagtgcagtggcgcgatctcggctcactgcaacttctgcctcccaggttcaagcgattcctatctcagcctcccgagtagctgggactacaggcgcataccaccatgccaggctagtttttgtatttttagtagagacggggttttgccgtgtatgccaggctgtctcgaactccagacctcaggtgatccgcctgcctcggcctcccaaagtgttgggattataggcatgagcccctgcgcccagccgaaactctgtctctatttaaaaaattaaaaatattttagggctgggtgcggtggctcaggcctgtaatcccagcactgtgggaggccaaggtgggcggatcacttgaagtgaggactttgtgaccagcctgggcaacatggtgaaaccccgtctctactaaaactacaaaaattagccgagcatggtagcgggcacctgtaatctcagctactggggaggctgaggcagagaattgcttgaacctgggaggtggatgttgcagtgagccgagatcccaccattgagccaagatcccaccattgcactccagtctgggcgacagagcaaggctctgtctcaaaaaaaaaaaaataaaaaataaaaaataaataaataaataaatattttttaaaaattaagggagggcacagtgggggtggggccagagacataatgaggggtgggtgggtgaggacagcaggcaggacttccaggcagaggcccccaggttctaggtggaggacagggtagcctgggccagacaagaatagctcctgctggctgtgtttctaggacaacaggctgctcgcaaacctcacacgtcctgccttccttcttgcaggcttcagggctcaacctgctctgtcttctgtcactcattcactaactcactcactcattcattcattcaagactgatcaggggccaggcgtggtggctcacgcctgtaatcccagctactcgggaggctgaggca[137 bp omitted]tgctcttctcttcttgtcattcattcattcaagaccggctgagcactaactgtgggcaggaccccctgctggctgctgtggacccagggaggaaatcggacttggagttcctgaactcaggaatgaccatctcatggggcagagatagaggctggttgatggcagtcctgcgaggcggagaggtgcggccagacaagggggaggcacaggccgggctgggagctcaggagggtgcctgcagctgccaggcatctctgagacctgggcatcgatctgtcagttaccagctcagcatgccagagagtggctatggaatcatgaaactctaggggctgcagagccatccccagacctggtcatcgtctttgaggagctcagaggtcaggagcttctcctcacatgaggtcaggagttcgagaccagcctgggtaacatagaaaaaccttgtctctacaaaaaatttaaaaaattagccagggacagtgatgtcttcagcctctcgggaggctgaagcaggaggattgcttgaggctgaagcaggaggattgcttgaggctgaagcgggaggattgcttgaggctgcggtgagccctctagcctgagtgacagagcaagatcttatctaaacccctaaagacaaaaagccaaaacaaagcaaaacaaaacacatgaaacaaaaaaccccaaaggggtgtatggggtgagaacagagcttcttgggtgccagactgggagcttggactttctgccttgggcaatggggagccatataattggatttgaggccctgatggaggcaaaatgagccagggagtcagttcagaggctgctgtagtggatcaggccaaagctgaggaggcctgagttggagtgtgggccaagggcacgcaaaggcgagaaggggcaagaggtggatgggagccaggaatcaccagtgtggagctctctgaacccacgagcctggggacccgctatctctgccgctagccctggaggtccctggctgggccctaagaccctgagtcttgcctgtccaggtcccttctccatcagcacttcctctgtatgtgcaagaaagggggctgtggttactgtggggatagagacctggagaagtgaaaccgtgctgagcatctgggaactggtgggggtaaacagctaaaatgttcttgcaggaaacagctcttatggggccagggtggtaggctacagatgaaagcaagggtgggtgcacgcttggctctggatcacctctagagtaccatggggctgagaggagcccaggaggagagaaaacaaggggatgagtcctcattcctgaaaatggaagatgggcacaatttggagcattttcgtttagctatttattttgcttacctgtgttgtctcctttttttctttccaatgactgtcttctttgtgtatttaaaataataaaagggggactttgagaggccg[134 bp omitted]gaggcaggaaaattgcctgaacccaggaggcagaggttgcagtgagctgagatcgtgtcactgcacttcagcctggatgaaatagtgagattcagtctcaaaaataaataaataaaataaaaataaaaaacaaaatattaaaaggggaaaaagacataacagtttgtatgccaggttgcagtggcaattggggacaaattaaatgtctaaacaaagatttctttttttttttttttggagacggagtctcactctgtcgcccaggctggagtgcagtggcatgatctcagctcactgcaacctccgcctcccaggttcaagcgattctcctgcctcagcctcctgagtagctgggactacaggcctgtgccacaacatctggctaattttttgtatttttaaatagagatgggatt[143 bp omitted]tcttcatgtgcatggggcagctcttagaggtgtgcacgcagggctttcttggtgtgggtgtttctgcggggacccacttgggggcttctgctccccttctgtggttctgggtgtgtggacaggctgcctctggctgagatttgagccccagctcccccagcttcagacgggcaaccttgggccgctaaagcctctgtttcctcatctgtagaatgggggcaatgacagtccccctcttttaggatgacaactgcgagtgtacagctcagggcctggctgtcagtcacctcctgactgatgaaagtgaggattgttcttcttcataataatgacagggccagagccgcatggctcacgtgagcaggtgctgcagaccccgaccctttctaggacaccaagaggctatcaggaaacagaccctggtgtctgggagacccactttctctctctacattaggctgggtgcccactgctgtgcctctggaagaacaggcttgtgtgtgcacatgcgtgcaagccaggacacgttcgtctttttatgtacatgttcacctatgcatttccagtgtttgtgcatgagcgaggccactgtgctgtacagctccagggacttccgtttacacagtggcctaagtaaagggctgtgcactgagcagcgacagggggctgccgctcctctgactgcagtgtggatggcagccctgagcctgtgcatacgcgggcaggcctctgggtgcacatctcactgcacatgtgtctgtgtgtctgggtgtatgagtgaggctgggtgtacatgtctgtgagagtgagttcctgtgtgtgtgtgtgtgtgtgtgtgtatttgtgcctctgcaggtgtgtttctctgggaatgcctgtttgtatctatatctgtgttcccatatgaagaggagggaaggagccgtgtggctgcgtgcttatgtgtcagtgtgtgtgtgtgaatgtctgtgcctttgggatgcttctttctttctttttctttcttttttttttgagatggagcgtggctcttgttgcccaggctggagtgcaatggcgcgatctcggctcactgcaacctccacctcccaggctcaagcaattctcctgcctcagcctcccgagtagctgggattacaggcgcccgccaccacgtccggctaattttttgtacttttagtagagacggggtttcaccacgttgaccatggctggtctcaagctcctgacctcaggtgatccgccagccttggcctcccaaactgctgagattacaggcgtgagccaccgtgcccagccaagggatgcttgtttctttgagtgtttgaaatgcacacgtttctctgtgtgcctgctcttgtgtgtgtggttgtacagctgtatgggagagagggggagagaacagtgggcttgggtgccatgccctgtgctgtgctggtcagctgtggccctgtgccaaacctggagcagctgcctttagaggccaggagggctacttcccgtttcctgagcactgtccctctgtctgcaggagtgctgctggatatacaggaggttttccagatcagtgacaaccatgctggtttgcttcagactggtaaggaggagccctggctctggagccggggccctgggttcatgctggggtgggctctttctgtgggtcatgttctgtgcccagctccagccccactgggtcccctggcacagagggtgggtggggtatgggcctgagggacagtctaggcaggagcaggagagagcctgggctggaacagccatggtagtttgagtgtagggtgccgcgggagagcagggggaggtggggctgggagaggtccctcagcctcaggtcctcgctgtggagctggccattccttcccttcgtgttggtgaggctcagcggtgcaccagaggcttgctgggctttgagaaatcctgatgtgtgctttcctctcacagaactgaaaaatctgactactgggacacacaaagtcaaacagacagacacagacaggcacatccccccacatgggctcagatggactctgggcccacagacagcctgacacccagcagcagggagcagccacacgtcccatcgcaacatcagagcggttggggtcatgaggcgttagcttttcccttgtgggtgcctggatggtgacacacacccacagtgtgcatatccacacacccacatgtgcacacacatggtcacaacacgtgatacgcctgtgcacacacccaggctgtaaccagcaggcaccgagggtcctcacagtccatcatctcagggctttagaacatggctcttaaaccggggtacagggatccctggggatacacagtcactttccaggggttacatgaacacagagagttttgagagactgatttatttctagattctcaagcctgtatgtttttttcctaaaatgacctgcctgagggggagcctgtggtcggcctgtggttctccttcctctccttccattgtacaattccctgtctaccatggtaaacagaaagggactcctctccgcatcctggatgtgctgctcctgggtgtaaaaacctctggggtatcaaacagaggcccctgcgtggatgctcggcttttcccagggggaccttgggagcaaagcagagagcatcaagagaaacgtgctggggagatttgccccaggctacaagcgcaggcaaggagccaagccttatctagctgttcccgtgtgcagtgtctactatttatctacaaattagaattcaaagtgagatagcggtctcagggatgcatgtcaacacatttctttcaatgaaagaaaatgaagccaacatttttcttataatcagtttgacgtctaattgctttggcaaaagaggacaggcattattacttagattctactgtagacatttcccataaactgaataaactcaaccctgtagctccaagagtttggatgaaaatacagtttaaaaaaatacacaacaacgctggaaatcccatccttggcaacgattcaaacttgggataagaacattttaatgttagctgaaaatgtgtggaggagtacatagttctagaaacttctttaagagtgacatgagagccaggtgcagtggctcacgcctgtaatcccagctcttagggaggcagaggcgggagaatagcttgagcccaggagttcgagacctgcttgggcaatatagtgagaccctattctccacagaaaggaaaaaaaaaagacaaaagagttacgtgagcaacagttagaagatcatggctttagaacatgcatggtttccaattgcccctcaatcttgtggccaagagacagcagctgatgctgatcttccagccatatctgtggccaaagtgagaccatcttggttcaacacccacaaccttctcgattaaatagataatggtggtttagtcaacatttcccttcactggttctttttttttcctttttttcttgagacggagttttgctcttattgctcaggctggagtgcaatggcatgatctcggctcactgcaacctctgactcctgggttcaagtgattctcctgcctcagcctcccaagtagctggaattacaggcacctgccatcatgccaggctgatttttgtacttttaatagagatggtgggggtgtgttggggggggtctcaccatgttggccaggctggtctcgaactcctgacctcaagtggtccaccagccttgacctcccaaagtgttgagattacagacgtgagccaccacactggcccttaccatagtatggttcttaccgtagtggtcaagattattactacaagtcctgggccacggagggagaagtgtgtgtgtgtgtgtgtgtgtgtgtgtgtgtgtttggcagtaggtgaagagaaaggtcatctttgcagaagcagctcaaaaatttcatgaaaggacagtgggcttagaggcctgatgaccaggctggtctctggtggcctcaggtgagtctctttaccttttccggttaccgtgctatggccctagacccagcctgttgtctgtccacagggctgctgagaagaggaaac[138 bp omitted]tgaaacctcgtctctactaaaaatacaaaaattagccaggtgtggtggcaggtgcctggaatcccagctacttgggaggctgaggcaggagaatcacttgaacccagaaggcaggggttgcagtgagctgagatcgtgccactgcactccagactgggccacagagcaagactgtctcaaaaaaaaaacaaaaaaagagaagaggagtggaaagtgagaagaggcagtggtcaggctccctccagccacccatgggatagagaagctgctggagtgagttcattaattaataatatttaaaactaacactgacttggcccttaccacatgtcaggcacgattctaagtgctttaaatatcaacttatttaatcttcacgacaatcccaccaggcaggttttactattatgtccattttacagatgatgaaactgaggctcagagaagttatgagacttgctgaagctgggatttgaatccaggaagtgtgcctccagagtctgtcttttaactctgggagcattcatttcacccactgtgtcacagaaatgatttgaattaggagaccttgggaatgaggagtgtctgttttccccttgggaagggcatctgcagattcacagagcgtctgcaggtttaaggcacttaaaacagcctgcaagtgatccctgcatgtgaggaatatgaggatatatacatatttgttgttgtttgtttgctttttgtttttttttttgagagagactctcgctctgtcacacaggctggagtgcagtggtgcgatctcagctcactgcaacctccacctcccaggttcaagcaattcttctccctcagcctccccagtagctgggattacaggcgcccgccaccatgctcagctaacttctgtatttttagtagagatgggattttaccatgttg[136 bp omitted]aacaagatatgaaataacacttgcccctccagaaggttaataaatttgactacaaagctaaacacttccgtatgatggtgattgaaattatgcaatcagtaataataatagataacatttattggacatttacatgaagctatgcagataacttttatgtgctttattttacttaattctctcagtaaccaaacaagggaatagcactgttgatgaaaggggaacacgaagagttaaggaatctaccaaaggtcacatagctagaaagtggtgagccaggatttaaacccagccaacttagtcccagaagttgcgtttctaattcttaaaacaaatataaaagactatgggaacttatttccaaaacatattaacaaacaacagcccaatagaaaaatggacagtgggccgggcacagtggcccacgcctgtaaccccagcactttaggaggccgaggtgggcggatcccttgagcccaggagttcgagaccagcctgcacaagatggtgaaaccccgtctgtgcaaaaactacaaaaattagccaggtgtggtggtacttgcctgtagtctcaactactctggaggctgagatgggaggatggcttgaggccaggaggcagaggctgcagggagctgagattgaaccactgcactccagcctgggtgacagagcgagactttgtctcaaaaagtaaaataaaagtataaatgcagctgtgtccagggaacattttacctatgtaggaaaaccaactttttcctggcttcctggaatcatcac[131 bp omitted]gcctcatcctctcgagtagctgggagtacagatgcccaccatcacacctggctaatttttttgtatttttttttttagtagagatggggtttcactatg[139 bp omitted]aggcccaggctgacttccctctttccctgctccccgttgccccagtaggtgcatgaatgaaaaatcagacctgtccccatatccaggctcacgggggtcatgtgtgtttgtaaagccgggaaactggcatctgctccatgcctgacgctccgcattcagttcccatctcaccttcaccatcctgggagaggatggtgacctctccagtgttggggtgacactcagagcaagcggcagagctgggctttgggtttggggccagattgaggcctccacactctgggctgcggctgcatgttggccacgcactgtgaggttcaccttatcttttcttcctcataccctgggcccactgccaagatgccagcttgtggcatctgagtcaggctccttccctgggcctgctgggccatctgccctgccacggtcgtggggggatccaggctgcccctgtgtgtctccttcagtcttcgttagctgcctgctgctgtctgcacctgtgtttggctacctgggcgaccgacatagccgcaaggctaccatgagcttcggtatcttgctgtggtcaggagctggcctctctagctccttcatctccccccgggtacgtgtccatgcccctgtccaggcccctgaggccccttccccacctgcttcctccctgattcagccccgtcagagctgcgtggggacaattctgctccattcctggctgtgactggatcagggattgcactgagggctgggagagaaggtgagagcacagtctccagtctccagcctgagtctgcacagggcagagctggtggactttttttttttttttttgagacagaatttcgctcttgttgcccaggctggagtgcaatggcgtgatctcgactcactgcaaactctgcctcccgagttcaagcaattctcctgtctcagcctccagagtagctgggataccaggcgcgtgccaccacgcccagctaatttttgtattttttagtagagacagggtttcaccatgtgggccaggctggtctcgaactcccagcctcaggtgatccacccacctcggcctcctaaagtgctgggattacaggcgtgagccaccatgcctggccaagccagtggactttcttaacaggaggccccctctctcctacctctcactgccgcaccagcttcatttctgcccgactctgctgggggtggggctgggggtaacagctgctgtcttggggaactggcctggttagcaatggtgggacccaggaaaagggctcccctgggcaggggggcaggtggtggctgcaggggacacacgtttgactttgggaacctggagtggagaggtgtctgtagccccgatcccctctccctactctggggtcctgtgtcatgaggtccccttggctcctccgacaaaccctcgggtccctggccctatgggtgatttctggaactcaccgtggtcttgtgcctgctcgcccagtattcttggctcttcttcctgtcccggggcatcgtgggcactggctcggccagctactccaccatcgcgcccaccgtcctgggcgacctcttcgtgagggaccagcgcacccgcgtgctggctgtcttctacatctttatccccgttggaaggttggtatcacccgtgggtctacttccccaggtggtaaactgaggcccaaaggagtcagaacaggggctggacctgggtaggagaggtcaaaccaggagggctgggatttgagtcccaatgctacccctccctcaccatgtgagtctacctctcctagcctcagtttcctcatctgtaaacgggggcagtgacaccagctgatgggcttggggaggaatagaggtgatgaggatgtgccgtatagattcacacactcggcagtgtggcccacccagggaagggccggctatgggaggtaaggtgaggaagcgtgttagggccaggccctgcaccccacaacaggctaggccagagcaggatttgcaatcaggaccctggcctctgacccaggtttcctgaacttgcctgactcaagcagggcccagccttgggcaggagggtgtagggtatgtgtttccataggtggagagagtggcgctgggggtgggccaggagccagaggtcactggtgacctgaccgagggcagtggacatctgggcctcacgtggcttactttcctcagtgaaacaggtctgagcctgcagagagccagctccctggggcgtggggggggcaccctgggtcaggctggtggtggggtctgccttccgcctccctcccctcacagcccatcgcccctgcccctttgttgcagtggtctgggctacgtgctggggtcggctgtgacgatgctgactgggaactggcgctgggccctccgagtgagtccagcttccttttcttccctctgctttccctctggaccggcagggactttccagccttgggtgaccttagccacttggcgtagcacccggcgccattagggggacggggggtggtggtcaggcatcggcagctttggacatgtggggcctcatagggagcatggggtgtggaagtggtggccgtgggctcaaaagctggctgcttagtttaccagctgtgtgatctcaagcagatcaccttcttcttcagagcctcagtttgcctgtcggtaaagcgggggtactaaatgctacctaaggcatcttgaggatcagtgagatgagagatggaagttccaagccgcagggtcagggtgtagagtaggcccttgaggactggcagctaggcttgctcagcagttcagcagaatgctcaagaagatgccgggcaggccccgctggggctccagcccttgtgtttccaacgtgggcatggagagggaccattctgaagaggaaggaactccatagtggagggtgctgagctcagccctgggagtgcagcttggtgggaatgcaggctgcgcgcagaccactgtggagccagcccagtgccggggagctggcgtgtgaagtgctgaagccagatttggaattttgggggtggggtgggcttcaaggaggcaggtctgacctggcttgaataaaccttctcatggtctcagctgtttgaaggctgccccaaggtgggtagtgagatccccgtccttggggtttgagcagaggggccgctaggagaggatgccagggcaggactgtgtggcagatggaggcctgggccagggaaagatcagctctaggacagcaagtactcaggaggcagggccagtgtagcgagggtccctgttctcaaccgtctcaggcccactgacctcaaaagactggtgtctgtactggaaagacgggaattacatgaagtcccaaagagtctccactccctggaaaggctgcagtggtgagggctgagaaacagtggtacatcctgctctgtggataccagcatccaggaatcaggtcacccccactacccccagggcttggaaaccagaggtcagccactggctgatactgtggccagttgcccccgggggtcccttgggctgtgataatatgcggccctgagcttcctgggccctcctgtccccaggtcatgccctgcctggaggccgtggccttgatcctgcttatcctgctggttccagacccaccccggggagctgccgagacacagggggagggggccgtgggaggcttcaggagcagctggtgtgaggacgtcagatacctggggaaaaagtgagtatccctgctaccccctgcaaggcacagaaaagcccgtttgtctgccccagcatcattgaccccctctctccacctccagggagccctccctggttgtcccagtgttcacagccctcctcttcctctgagatcgcacttaccaactgaagtgcctctccctcccttagggctcagcctccatcaccttgccatgtgacagaaatatggacagagtgggagggagatggcgtgagccccagccttccctctgccctgcccataagtggctccagcactcagagcctcaacgtcctttgtattcaatggatggaattctccagccttgcccccttctccgggttgctgggaggatgctgggaattcatcactcacctctccaagcctcatggcgtgcatgatcctctgtgccagccatgctgggggaggcaggcaggagtcaattgctggtcccaggcctcatgattcactgcaaggcagggcatggacaggattcaattctgttactgagctgtgaaactggtcgggaggactcagaggaagacagggcaggcagggacagcttcctggagaatgtgatgctggatgggggcctcccaggatggggagatttggtcctgcagagaggagggaggaggaggcaaggtgtgtgagttgggggggtctcagaaatgttggggaggctggagctcagggtgctgccaggaaggatctggaggctggagcttggggtaacctgagtgtcttcttcttcggagcctcagtttgcctatctgtaaagagggggtagcaaatgctacctatggaatcttgaaggtaatgagacaagatgggaaagttcctagactgcccaggagtggggaggagtggacaggccccttcagccccagccctctcccaactccagctggggcacctcgtcttgcagctggagtttcgtgtggtcgaccctcggagtgaccgccatggcctttgtgactggagccctggggttctgggcccccaagtttctgctcgaggcacgcgtggttcacgggctgcagcctccctgcttccaggagccgtgcagcaaccccgacaggtgagggcatccgggggccctgggcacctggcccggctcgggggctcttgctgaggaagttctgaggttctgagctccaaaattcagtttcttggggtggggcatttggtgctgtgtgaagacagtggagctcaggacccagatggcagcaggaggcctggctctggctctggctgagcctctgccactctgggtggccatggccaactctcttgtcctctctgggctgaattccccatatctccactcttggggctgctgtgggctccagaaggcactggttggaaatgggggtgaggcttctgtggggctgtgggatgagaggagccttaggcagccaccctttagaggggcctgtagcgtcttctgtgagggcatcccattttacagatggcaaactggggcctgggaggccttgttacttcgctggttttgggatttcacgtgtgtgggaaggctgccgggaggggaggcgcgggcactctgccctcagggcacgccctctcccgcttcctgcctggctgtctgctgcccggctgggctccacttctgttcctatcgcctttgaccctgttctccaagagctccagtgaccacttgatgctgagtcaaggacatccttcaatcctcccttccttctctcctcctcctcctggaacccttcaccccggcctcctccctgcctccaggggctgctctccagcctccttgcagtcccctcctcctctctgaccctgtcctggtgggtcctgggggctcctggggatgctatcttcttccctggagctccatcctcccccagggttttggcgacactcgtcctctgctgactgcacccacgcctaccttctccttccctcctcctcctccttcctcctcttttctctcttctcctctcttctcttctctccttccttctctctttctttctttctccctccctccctctccctctccctctcccctcctctctctctctctccctacccctccctccctccttccctccctcccttccttacttctcttcttttctttcttttttgagtcaaggtctcactctgtcaccaggctggagtgcagtggtacaaacacagttcgctgcagcctcgacctcccaggcttaagcaatcctcccacctcagcctcccaagtagctgggaccacaggcacacgccaccatgcctggctatttttattttattttattttatttatttttttttgagacagagtttcactctcgttgcccaggctggagtgcagtggcacaatcttggctgactgcagtttccacctcccaggttcaagtgattctcctacctcagcctcccgagtagctaagattacaggcatgtgctaccatgcccagctatttttttttttttttttgtatttttagtagagatggggtttcaccatgttgggcaggctggtctcggactcctgacctcgaatgactggcccgcctcagcctcccgaagtgctggaattacaggcgtgagccaccgtgcccggccgaacttacagatccttaagggctctcttggctgtaagagtctgtgatgctgggagggccctgtgtggatggagggaacatgaagggcttggtagctggggcatgtcctctggctgcccctcctgcttaggggctggcgggggtgcattttcaggcagcctgtctaaataatcaatcctaagtctcatgaatatctcgagaacctgccaaggtcagcccagaccaggactcagaggcagctagcatacatccgggatttgggtcatttgactgggctgagccagacctcgcacagcttggaagcctgggaaggtttagaaagcacttcttcttcttcttctttgttttttttttttttccatttgagacagagtcttgctgtgttgctaggctggagtgcagtagcacgatctcggctcactgcaacctcggcctcccgggttcaagcgattctcctgcctcagcctcccaagtagctgggactacaggcgcacaccaccacgcccagctaatttttgtacttttggtagagaatttagagaattctcagtcatttgtgcaaagtgagggtgggagaagagagggcaagctacatcggtcagcgtggaccagtcccgcagagtcatcagtgctggtcaggagcttgctcagaggacgacagggagctattgagaggttggaaagatcctggttggactggtgttttcaagagttcacagtgggcacagtctcagcgttccctttgagctcctttatttgttttgttttgttttgtttttgagacggagtcttgctctcttgcccaggctggagtgcagtggtgtgatctcagctcactgcaacctccacctcccggattcaagtgattctcctgcctcaacctcctgagtgggctgggattacaggtgcccaccactgttcccagctaatttttgtatttttttttttttttagtagagacggggttttgctgtatcggccaggctggtcttgaattcctgacctcaagtgatccacccacctcggcctcccaaagtgctgggattacaagcttaagccaccttgcctggtcccctttgagctcctttaaaagggggctggaggttgcacaatggaccaggagggtgaagaagtatattcaaatcctggtctgtaatttaccagctgggtaatcttggccttgacttttctcagcctcaccttgctcacctatccatctgggaattgttgcccaagctggagtgcagtggtatgatcatagctcactgtggcctcgaacttctgagctcaagcgatcctcccgcctcagcctcctgagtagctgggactacaggtgcacgccaccaaggctggatgatttaaaaattttttgtagagacaaaatctttctgatctggaactcctcccaccacagatctcctgccacaaaatgcactcctggggagcctttgtggaggttattttggagggacaggtctccacaggaaggatgtacaaggggaagccaagcagagtagaagtggctctaaaagtgggtgggaaagggacggaagtcaggtaggggctgcctgagaggggttcaaagacggggagtggaaggatgggattcaaggagggagggcgtgtagagagcccagacaagggccaggtgtatcacaggggctcagtaaatacatgtttgcttccctccattcctcttagtactgggagctggaaagagagaaggttggggccagggtgggaccctggaattcagattttgagtggggcagttttggggggtgaaagggtaagggtcaatggagatgaggcaggctgggacctggggtgcagggtgatcacccacatggccagtgggatccccaggatgagacaggagatgaggcaggaaagggggtaggggagagcagtgggacattggtccctgggagtatcagtgaggagggtgggtaaggttctgggtcaggtcaggggcccacagccatattccctgtagacaccagatcatgcacttgagccgaggggctagacctggggctgggagcaggataagagtccctatgctaagctcacccagctgaccaacccttctgtgctcttccccatcagcctgatttttggggcactgaccatcatgaccggcgtcattggggtcatcttgggggcagaagctgcgaggaggtacaagaaagtcattccaggagctgagcccctcatctgcgcctccagcctgcttgccacagccccctgcctctacctggctctcgtcctggccccgaccaccctgctggcctcctatgtaagtgagagcctctatggaggtggggacagggttggggggcgaggaactcctgtttccacaggctcatgctgcgcccggcctttatgtacaattatgttgatcactccttctgagtagagcttgttatccccattttacagatcagtaaagagaagcttggctggacgcggtggctcatgtctgtaatcctagcactttgggaggtcaaggccggcctggccaatatggtgaaaccctgtctctactaaaaatacaaaaaattagctgggcatggtggcaggcacctataatcccagctgcttgggaggctgaggcaggagaatcgcttgaacgcgggaggtggaggttgcagtgagctgagattgcgccactgcactccagcctgggcaatggagcaagactccatcttgggggaaaaaaacagagagagaagcttaccaggagttccacagtgaagaaggggcagaactgggatttgagcctgagcttttctgactgtaaaaggtgtcctctgagcattgggttaatgtgttaatttgagaaaataggactcatttattgccagggcatattgtgggcccaagaagaaatagagcaattctccccaggttacagaggagggaagcaaggcccagattggttatggccaatgtggacgctgctttaagggcaataatcatggtaatatcaagtgttccaaatccacatcccatcacaccccttcatgggcctcacactctggctgtgccagccgtgtgggcacacacacttcccagactttgcacgcgtccatttcttccaccaagaacaccagttcctcttttgtgcatcctgaaatcctccttctgcaagactcaactcaaagtccgcttcctccaaaagccttcccctaccactctatcctcacaccagaattcacgttcccacttgggctcagcacctgtttgggtcccatgaggcaccaaggtttatggggcctgtccacagacagggagcccaaagggcaggaccagagccagagggtccctgtgtgcagccgtgtccctggctccccaaagccccagccctgcctgtcccccaacatgggaaagggctactgcttctgggaagatgacgccagcccagccacaagcagaggggctagacctctcctcctttcccagctccatggccctgggccctgtggctgcagacacagatgcgcttgcacatgttaaccaggtttactgagcagactggactttggaaaagtaaaccagccacaactttattgtcctcacactagtttggctgcatctcctacccatggccagagcccattgcttctctagtcacacacatgaactaaacag[136 bp omitted]accaacctccacctcctgggttcaagtgattctcctgactcagtctcccaagtagctgggattacaggcacacaccaccaagcccggctaatttttttgtgtatttttagtagagacggggtttcactatgttggccaggctggtcttgaactcctgacctcgtgatccacccacctcagcctcccaaagtgctgagattacagtcgtgagccactgcacccagcctttttttttgagactgagtctcaccctgttgcccaggctggagtgcggtggcgcgatctcagctcacggtaacctccgcctcctgggttcaagcgattctcctgccttagcctcccaagtagctgggattacatgtgtgagccaccacgcccagctaatttttgtatttttaatagagatggggtttcgccacattggccaggctggtctcaaactcctgacctcaggcgatccgcctgtctcggcctcccaaagtgctgggattacaggtgtgagccatcacgcccagccccaaacaaagcttctatccggaccagaaaactgccttgggaagaggcagggctgtcgtccggttttgttctccttgttccatcttctaccccaacatccctgacatctcccctccccttgcgattctgtcctctccagagatgagcaggcaaggaaggatgactgagaacaggccaagtattgcctgtgtccggagctgtttctgctgactgtcggtgccccacatgtggcagatgcccagaggcggggtgtggggggtactttgtgggcgttttggggtctctggccctggtttttgctttgcccaattccttgatgcaagggttgcctttccagccaggctgtcttgccccggtaggcaatcctgcaaggggccccctctcatgagcaccgtgtctccctccacggtgtccatctgagccctgtaggatgtcgggaagggaggcctcccccactgccgccctctcccctcccacgacactgcagactactccatctggcatccccacccacagacttcccttgggggagtcagggcccagggtccattctccccgaatgccagatgacatgcatctgagtgtcctaaagacgtcttctatgcacgcccctcaggctgtcctggtataggaggctcagcatttagccagcgtccagtcagggagaaaaggccagcttccttcctggcaagcactgccctctgtggggggggggtgagtgtcacctgaagcccctcactcagcttaagagtagaactctttattctttatttattaacttttttagagatgggggctctcactatgttgctcaggctggtcttgaactcctgggctccagcaatcctcttgcctcagcctcctgaacaactgggactacaggcgtgcaccaccacaccaggctaatttttgtatttttagtagagatggggttttgccatgttgcccagcctggtctcgaacccctgtcctcaagtgatctgcccatctcagcctcccaaagtgctgggattacaggcatgagccaccgcgcctggtcaagagcagaactctttcaataaatcctcccctgagcatgacttccacgcaagcagtggggggccaaatgggatagctctgttctctcgccgagtcctgaaggtgtgctggcacctctcttgagatgtgggcactgctcatcccttgttctcagccttgggtctctgcagaaattcctgaagactagaaagtcttgtcattctcttctgcacgtgctcttatttagtcctcacgactgacacttttgtggggaaggttttttcttttcatattttattttattttatttttttgagacggagtctctctctattgcccaggctggagtacagtggcacgatctagactcactgcaacctctacctttcaggttcaagcaattctcctgcctcagcctccccagcagctgggattataggggcatgccactaattgttgtgttttttggtttttgtttttgtgttttttttggttttttttttgagacagggtctcactctgtcgcccaggctggagtgcagtggagcgatctcagctcactgcaacctctgcctcccaggttcaagtgattctcctgtctcagcctcctgagtagctgggattacaggcccatgccaccacacccagctaatttttgtatttttggtagagatggtgtttcaccattttgaccaggctggtctcaaactcctgacttcaagtgatctgcctacctcggcctcccaaggtgctgggattacaggcatgatccaccacgcccagcctggaaggttttttcttatgccatttgacaggttggaaaactgaagcccacagatagaatcaggtaaatagtgggacagacaaaactccaacacctggctgggtgcagtggctgacgtctggaatcccagtattttgggaggccaaagtgagaggatcacttgagctcaggagttagagaccagcctggacaatgtagcaagaccctgtctctacagaaaattaaaaaattagttggacatggtggcacatgcctgtagtcccagctactggggaggctgaggctggagaattgtttgagccccagtgatagaggctgcagtgagctctgatcatgccactgcactccagcctgggtgacagagtaggaccctgtctcaaaacaaacaaacaaacaatcaacctccaacttggccgtgacgcctccaaagtctgtgtccttcatagtgcactgatccagaaacagcggggcacaccccaggcactagtaaatcccttaatgcttattgactgagggaggggaccatcacttctggctggtgggagctgatgggggctggtggggcctgacctcacagggaggctggggcccaggcagatggaggccccatcaaagctgtccctgtaccagccagctggggctgggggccccctgccagccctgcttctgccactgtcttggttggttctgggaggtgctccttggctgtgttttggggacacagctgcccccccctcaccccctgcaccctgcagcctggcgcatctctagagctggttgtctcatccagaaatgacattgcgtcttggccgccaaagccagctggagaaactcttctttaggcctgccctgggggttggggctgaggggcagaaaggcgggcagggccagagtgcatccctcctctggcgctgggaagctgctgggtctggcatggtacccaccgatgctgagcctctgcggccagaactctaaccctcagaggtgatgccatcccgcccccaccccttggctctgtctgtgcctccgtagaatgctcggatgttctgacctgagattcaggctccagttcttccttcccaacaactgtcagtcacaaagcccttgacctctcccaggcctaccctcctctccgtcctctctgcccttccctggctcatgccttgctgtctttctccagaactgttctagaagccaccttcctggtctccgtgtcttcctgctcacccactacagtctgttcttctgttcttcacacactgccagagtgagctagctagcttgcttgctttttctttcttttcttttcttttctttccctccctccctctctcccttcctctccctctctctctccctccctccctttctttcttctttctttctttctttccattttctttttcttctttctttccttcctccctccctcccttctttcttctttctttctttccattttctttcttttcttctttctttctttctttcttcccttcctccctcccacccgccttccttccttccttcctttccttcctttcttccttccctcctttctttcttccttccctcctttctttctttctttctttctttctttctttctttctttctttctttctttctttctttccttccttctttctttctttcttttctttctcttttccttcccttccttccttccagacagggtctccctgtgttgcccaggctggtcttgaactcctggcctcaagtgatcctgcccatgctgcctcccgagtagctggaattcaggcatgtgtcactgtgcctggctgacagagtgagctttctgacaccacctcccttccctgctcaaaagcctcgcatggctccctggtgcctgtggaactaggcccagccccttatcccggcatttaaagcccctcatgaacttctccaataaccttaggagccttattcctccactgaagtcctgccacgcaggtcccctcttgattccctagtcattcctcccctctccctctctttccccatcctcactcccttctccatgtgtccagagcattctaggccttcaagggccagcttaccaccgtctctccatggattcctccctggttgctgggcctgaccctctctcccttagtacgcccagtgttgtcgtcctggggtctcagttacgtacgttctgactcctctcccagccctgtctgtgagtttagcagggtccaggtctggttctagtctttctctgcactccagcttgaagcacagtgtcaggcacgtggacaggtgggtgaggtaagtcactgctggctgagtgaagagtcgagtgacaaactgtttgtattcatttgtttattcaaccaatatttattgattgtcaattaagtggcatactagtttaaatgctgtagatataggcagctgggtgcggtgcttcatacatgtaaccccagcactttgggaggccgaggcaggcggatcacctgaggtcaggagttcaagaccagcctgggcaacacggcaaaaccctgtctctactaaaaatacaaaaaattagctgggcatggtggtgtgtgcctgtggtctcagctactggggaggctgaggcaggaga[132 bp omitted]ataaaacagacaaaaatgtctctgtcctgagagaacttacattctagttgagggagatagataacaaacaagatatataagtattgtgaattttattgtaaaattcagagtatttcagataataataaaggcttaggagagaagtattgttgggaaggaaatagggagagtgtgagtattgggaggagagggtagcaattttttgtagggtggccagagagacctctctgagaaggtagttgttgaataaagacctgtagggggtgaagtagtgaattatgtggatattcgggggaacagtgttccaggtagagggaacagcaactgtgaaggccctgagtcaggagtgtacccgatgggtttgaataacaacaaggcggctactgtgattagtgcagagagagaagtgggagagggacgtgaggacagagagatgatgggtgccagatcatgtaggatgttgtgggcattgggtgagatggagttttgttctaagaagtgagacatctggcttttgtcttccgcatctattgaaattatcatgtagttttgtcctttattcaatttctacagtttattacattgactgatatttatatgtttaaccaaccttgcattcctgg[133 bp omitted]gctctgccgcccgggttcacaccattctcctgcctcagcctcccgagtagctgggactacaggcgcctgctaccacgcctggctaattttttgtattttttttttttttttagtagagacggggtttcaccttgttagccaggattgtctcgatctcctgaccttgtgatacacctgcctcaacctccgaaagtgctgggattacaggtgtgagccaccgtgcctggctgaattgctggatttgagtttgtagtattttgttgaggatttttgcacgtacattcataagagatattggtctgcagttttcttgtggtgtcttcatctggttttggtatcagggtagtggccttgtaatgagttggcaagtgttccttcctcttctgttttttggaagacttcatgaagaatttgttaatttatctttaaacatttggaagaagtcaccagcgaagccatctggttctgggcttctgtttgtggaaagttttttgattgctaactcaatatttacttgttataggtcaattcaaattttctatttcttcttgagttgtttcagtagtttgtatctttttaggaatttgtacatttattctaggttaatctaatttgttggcacacaatagtttatattatataacagttccttctaattcttttcatttctataaggtgagcagtaatgtcccccctttcattcctaattttagtaatttgagtctttttttcttggtcagtttatctaaaggtttgtctatcttgctgattttttcaaagaaccaacttttggtttcatc[132 bp omitted]tgcctcagcctccccaggcattaggattataggagtgagccaccctatctggctggcttgtgctgagtagaatcactctggctactctgttgagaatagacctgggggcaagggcagaagcagagaggagtgaggaggctgttgttagaatgcaggtgagatgatgcggtttgaaccagagtggcaacaatggcgattgtgagaggcagttggattacatatgtattttgaaggtagagctatcagaatttcctcataaattccaggaggggtatgaaagaagagtcagaggtgagttccaggtattggcatgagcagctggaaccggggagggcccattaattgaggcaggaaagtgagcaggagcagcaagtgttttggggaaggtcaacagcttggttttatacattctgagtttgtcgggggaggttgatatccaagtggaggtgttagtagacagttggatacaggagtcggaagtccaggggatatggaatcatccctaaaacttcaaagggtgaaaacatttttggggagcaaaaggagtcagcattaggatgggtgtccagagggtgctgaggaattggcttctgctgggattcaaaatatgatgtcaccttactttcttctactcatccatccacccattcaccaatccatccatccatccatccatccatccatccatccatccatccatccatccatccatccatccatccatccatccatccatccatccatccatccatccatccatccatccatccatccatccatccatccatccatccatccatccatccatccatccatccatccatccatccatccatccatccatccatccatccatccatccatccatccatccatccatccatccatccatccatccatccatccatccatccatccatccatccatccatccatccatccatccatccatccatccatccatccatccatccatccatccatccatccatccatccatccatccatccatccatccatccatccatccatccatccatccatccatccatccatccatccatccatccatccatccatccatccatccatccatccatccatccatccatccatccatccatccatccatccatccatccatccatccatccatccatccatccatccatccatccatccatccaccaatccatccacccacccatccaccaatccatccatccatccaccctcccacccacccaccaatccatccatccatccatccatccacccacccacccatccaccaatccatccatccaccaatccatccatccatccatccatccatccatccatccatccatccatccaccaatctatccatccatccatccatccatccattcaaccacgcacccacccacccacccacccaccaatccatccatccatccatccatcccttcacttctcagatggcaggaaccaaagtccttcctgcatgatttctgctgttgaaggagtaagtcctggggagacaggctccaaactcttcttgggaagggcccaagaagggtatagacaggctccaaactcttcttgggtgggcatgtgtgctggtgtgtgcatgcatctgagtgtgtatatgttcattcttgtgtgtagacattaaaatgaatatactggccgggtgcagtggcttacgcctgtaatcccaacactttgggaggcaaggtgggtggatcacttgaggtcaggagttcaagaccagcctggccaacatggtgaaaccctgtctctactggaaatacagaaattagccaggcatggtggtggcacctgtaatcccagctactcaggaggctgaggcaggagaatcacttgagctcaggaggtggaggttgcagtgagccgagattgcgccactgcactctagcctgggcaacaaagcaagactctgtctcaaaaaaaaaaaaaaacaaaacaaaacaaaaaaccaaacctgaatatactagccaggcatgatgactcatgcctgtaatcccagcactttgggaggtcaaggtgggcgaatcacttgaggtcatgagttcgagaccagcctggccaacatgctctctcccatgcccctgtccccactaaaaatatattaaaaatttagctgggcgtggcggcatgcgcctttaatcccagctactttggaggctgaggtaggagagttgcttgaacccgggaggtggaggttgcagtgagccgaaatcgtgccactgcactccagccgggcaacagagtgagactccatctcgaaaaaaaaaaaaaaagaatatacttgtacatacaatatacatttagcatgaacatgctaaatgtatattgtatgtacaaatatatctattttaatttgtatgtatgtgcatggtgtgtatgagtgtgtcgatgtgtgctgttttgtacacttatctgtgcacgagcatgcacacccaactcaggacatgcagataactgcgtgggacgtgcctgtgtgcacatgtggacctgcagctaagtatagcttttctcctgctacttttgtgcctgtaactgcattgtgtgggcaggatgatttttggtggcactgtgtgtctgttcccagatttcctgaagtaggggccaaatcatgctgcttgtttcatggaaatgagcttttctgagaatataaagtctggtctggggccttccctgggggagcccatgccctgtggccacgtacagaaacagaggcttccatctcttccatctttccagtcctcttggcaagggaagtggacttctcggctgttaattagggtccagacacgcacacagcaggtcttggcttataccaccttcgttggccttcttcccagagctgctgcccttcagaagagaataggtttgtgctcagaggagggactgcacccaaagcagggcctccactgtcactgacctgatggctggaggatgtggctgaacgtcggctatccccccttaggtgggctttgtggtcaaggtggaggggcaggagtgggacatgggagggagcatgctgtgagctgtctgaaagacctggccatcattccttctttccttaccagttgtgtgacttgtgtgacctagggcaagatcttgaccttgctgagcctcaattttcttagcaagaaaatgggagtgctactctttacctctcggcttcattaaagagataagcaaacttttgagcctgttcttttttatttttttattttttgagacagagttttgctcttgttgagcaggctggagtgcagtggcgcaatctcggctcactgcaacctccgcctcccaggttcaagcgattctcctgtctcaacctcctgagtagcgggattacaggcatccaccactatgcccggctgacttttggtatttttagtagagatggggtttcaccatgttggccaggctggtctccaactcctgacctcaggtgatccacccgcctcggcctcccagagtgctgggattacaggcatgagccaccactcccggctgagcctgttctaattactatgcatatgtaacaaaatttaatggcttaaaacaacaagaacatttattttgctcacaaatttgcagtttggaccaggcttgagagcaagaggggatgacatctcttttccacttggtgttagctaggctggataagggtgaggggctggatcatcaaaggggtggggcctgcctggcagtcgattcagctgttgactgagaccttagcattggctggtacacctgtctgtggcctctccgtgtggtctgtgcttcctcacagcatggtggccgggttaaacaaggactaatgttctgagatagcgggccaggtagaactgtgttgccttttatgacctacccttgaaagttaccatgaatgtaacttgcattctctgcattctatttttttttttacctgagcacaactttctgctcatattagtggggcaaagaaatggactctaggccatgcgcagtggctcatgcttgtgatcccagcactttgggaggccgaggcgggaggattacctgagatgaggagttcaagaccagcttagccaacgtggcaaaaccccgaggctacaaaaatacaaaaattagcctggcatgatggcaggtgcctgtaatcccagctacttggaaggctgatgggggagaatcacttgaacacaggaggcggaggttatagggaggtgggatcgccaccaatgtgctccagcctgggtgagggagtgagactccatttcagaaaaaaaagaaatggactctatcttttgatgagagtatcagtgatctgaaagaacttgtggaactggaaatattgcagtgactgtctttggaaaatgcaatctcccatcatgccccagggtttccttctcttctgtcccctgggccctgccgacatctgacattgcatgggaaagtgttttgtgtgcacagtggcgaagcctaccagggtgggtctctagttccacgctgctcttttggtctcacggtgagaaacccggactcgagtgctcaccctcacacccctgcttggcctcatgggctgagggagcaggtgtgcttgagatctcaaagggccaagcctatggccatggccaggtggctgagatgcaggtctccaccaggaaaagcagcaatgtccactcacttatgaaatctttccccagcgcctcctctttcccagacgctgttccaggcactggagtacagcatgaacaaagcaggcaaaagtatgtgtgtgtaatacaataaacatggaaaatcaacaccataggccaggcacggtagctcatgcctgtaatcccagcacttcggaaggccgaggtaggcagatcatgaggtcaggggtttgagaccagcctggccaacatggtgaaaccctgcctctactaaaaatacaaaacttagccgggcatggtggcacgtgcctgtaatcccacctatttgggaggctgaggcaggagaatcgcttgagcccaggaggcggag[133 bp omitted]aggcaggcagatcacttgaggtcaggagttcgaaaccagcctggccaacatggtgaaaccctgcctctactaaacatacaaaaattagctgggcatggtggtggtgggcacctgtaatcccagatacttgggaggctgaggcaggagaatcgctggaacatgggaggcggaggttgcagtgagccgagatcgcaccattgcactccagcctggtgacagagcaagactgcctctcaataaataaacaaacaaacaccatagtatgttagatggggatgagttctctggagagcaacagcagggaaaggggacaaagagagcgacaggggcaatgcacagggccaggggaggccttgttgagacggagacactccagaagcaggtgtggggtggagccatgtgggtgggggtggagcggggaagcgcagtccatgcggagggcagcctgtgcggaggccctgagggagaatgcatggctggtgtgttggggagatgtggctggaatggggtcagccagggagcagcagaggcgatgaagtcagaggtcacggtgatgggggagtgagggtgcggattatggagggtcttgtacatagattcactctggcttcccatgtcactgacattggaagccaccagactgtccagcgcagaggtgagaggatctgacttaggggttgtatccggaatctactgctgcaaaaaaaaaatcaccccaaaacttcgtggcttaaaacaatgcccaattatttctgattctgtggcctggctggatggttcctctgctggtttgcctgtgtccgctcatgtggctgctttcatctggatgattactgcactggaatgtccacgctgaccttactcacctccggctgtcccctgggtccccttcatccttctccgtgtggccgttcaccctcccctaggctagaccagcttccttatatgaccatctcagggcaatgctctaagatagcaaaagtggaagttgcaaagtctgttaagcaccaggccaggaacttgaaaagcatcacttccacctgatttatttaatttaattaaattaatttatttatttatgacagaatctcgctctgtcgcccacgctggagtgcggtgtgatctcggctcactgcaacctctgcctgctgaattcaagtgattcttctgcctcagcctccagagtagctgggattacaggcacctgccaccatgcccggctaatttttgtatttttagtagagaggggggtttcaccatgttggttggccagggtggcctcgaattcctgacctcaagtggtccactcgcctcggcctcccagagtgctgggattacaggcatgggcgacggcgcctggctacttccacctgattttattggccaaagcaaggtataaggccacccccagtttaccatggcaggggacttcatacaaagtgtgaatgtcaagaggcctgattaatttggggccattttgtagcttatggaccacgtggtttaacaggctctctctggctgccacgttgagaatagaatgaaagaggacaggctgggcgtggaggcgcacacctgtcatcctagcacgttgggcagctcaggtggaagaatcgcttgagcttaagctcaggagtttgagaccagcctgggcaacatagagagaaaaaattaaaaaaacaaacaaaaaataaattaaaaaaaagaaagaggacaaaggcagaaacagagaaatcactccagaggatttgtagtaatataggcaggagatagtgatggcttggaccagggtagctatggaggaagtgtggagaagtggtcagattctgggtatattttggaagtagaatgaacagggtttcctgacagactgggtgtgaaagaaaggaaggagtccagggcggctccaaggtttttgccctgagcagctagaagcatatggagttgccacttactgtggggcagggggcggtggcggcgggggaagactgagggaggggcaggggtttttgttttggagggagggattagcagttccattttagacatgttacatttgaggtgcttcttaggacattcaactggacctcttttctttatttctctctctctttcttttctttctttctttctttctttctttctttctttctttctctctttctttttctttctttctctctctctttcttttttttttttgacggagttttgctcttgtcaccgaggctggagggcaatggcatggtctcagctcactgcaacctccacctcccgggttcaagtgattctcctgcctcagcctcccgagtagctgggattatggggcatgccaccaggcccagctaattttgtgtttttggtagagacgggggtttcacgatgttgcccaggctggtctcgaactcctgacctcaggtgatctgcccacctcagcctcccaaagtgctgggattacaggtgtgagccactgcgcccggcctcggacctgttttctaagacaggttcttgctctgtcacccaggctggagtgcactggtgcgatctcagctcaccgcatcctggaccttctgggctcaagtggatcctcccacctcagccttctgagtagctgggactacaggtgtgagccaccgtgcccagctaatttctgtatttttttgtagagacggggtttc[142 bp omitted]aatgcaaacatggtgaaaccccatctctactaaaaatatagaaattagccgagggtgacggtgggtgcctgcagtcccagttccttaggaagctgaggcatgagaatcacttggacctgggaggtggaggttgcagtgagccaggatcgcgccactgcacgccagcctgggcgacagagcgagagactccatctcaaaaaaaaaaaaaaaaaaaagcaattggatatgtatgtgtctggagttcaggagagaggtccaggctggttatttaaagccatgagaccaaatgagatcaccaagggcatgagcatagacctgaagctcgagcttggacgcattccacatgtcagtcaaggctgtgaatgcgcagtgctaccgtggtgaggtcaagggtgggaccaacaattcactgtatcgtgttgtatcaaatgacttttatatttttatttgggagacactaaaaaaacaaaaacaaaagcataaaagtacagagaagaaaataaccgttattcacgttttcatctacaagaataaataattcttcacattttggcctttttgcttctatatttgttatttaattaggtaaccgtcattccgtacacgtgtctctctatacattcacaggcttatggttaggtaaaaatagttttattaaactggggttatatagtagtgcaattttt[218 bp omitted]gaggctgagaatcgattgaactcaggaggcagaggttgcagtgagccgagatcacgccactgcactccagcctgggcaacagagcaagaccctgtcttaaaataatattagtaataattaatatattggacagttcacccaataaagtgtataattcactggtttttcgtacattcacagagttctacaaccatcaccacatcagttttagaacattttgctcaccccaaaaagaaatttcatgcctattagcagtcacccccatttcccttcaatctatctctctgctccccagcccgggccctaggcagctgctaaatctactttctgtctttatagatttgtctgttctggataattcatataaatagaatcatataatatgtttaatttatatgaatccacttgaataaacgtaaaatcaaaggaattaagttcgaattagttgtaaaactgtggacttattgatgaatactagctatgaaagaggacaccagccttcttatacctcctctctcccttctctccccaacctcctgatttttgttatattaatatctttacttttccagatgtagagcattcacagtctgttctttttcttttttttgtgagacacagtttcgctcttgttgcccaggctggagtgggatggcacgaactcggatcaccacaacctctgcctcccgggttcaaacaattctcctgcctcagccttctgagtagctgggattataggcatgcgacaccacgcccagctaattttgtatttttagtaga[153 bp omitted]caacagtttcacatttaagtagattcaatgtttgttatcagtctgtttacacagattctttattcctgagtttttattttgcttcaactcctaactgggtagattttatgattaaggagtttttatctaccccttgtcccccaaaaggctagagagtttattttcttttggttcatttattcgtgagattgtcttttctttgatatttatttatttattttgagacagggtcttactctgtcactcaggctggagtgcagtggtgcaatcatggctgtctgcagccttgacctcctgggctcaagtgatcctcccacctcagcctcccaagtagctgagaccacaggcatgcaccaccacacccagctaatttttgtattttttgtaaaggcagggtttca[132 bp omitted]agcttgaagccaatataaggaatttccttctgctccttctcttatcacctatcttttaggttggattttttgtttttttttgagacagagtctcactctgtcgcccaagctggagtgcagtggcacaatctcagctctctgcaacctccacctcctgggttcaagcgatcctcctgccttagcctcccgagtagctgggactacaggcgtgctccacgacgccagccaatttttgtattttttagtagagatggggttttaccatgttgaccaggctggtctcgaactcctgacctcaagtgatccacccgtctcagcctcccaaagtgttgggattacaggcgtgagccactgcgcctggccaagttggatttttttctccttgtctccctcccttccttccttctttccttttccacaatatgtatccatagtttacatgcagaatactttcctctgagctgggtgtaggcagctctgctcagaaaccgaatttgctttgatgtaatgtggatgactctttgtctttgactctccctgccttctctgtgaccattccattgtccaaaggggatgcagtttgagttgagcttgggctccgcagacttttctgttgccggagggaaatgcagggctcaggcaaatgaggagtctgtgaaaacacctgggctctgctctgtcttctgggattcaggtaaatgctctacaacatggttcattctacttaattactggatgcattcccttctgagatgggggttgccctcaggccttgagtggagtccgtgattggagccattgttggctttctctgtttttcctctccccagcagctttccctgctggctctcagttagggactactactcagttaatttctctccagatatgggggttttagtgaatggctttggggaggggaagccgagaagggtattactctcttctacagaattgtctgctcttttgcttggcagcctttttttttttttttttttttttttttttttttgaggattttgctgtcacccaggctggagtgcagtgcagtggtgtgatcatggctcactgcagcctcaacctcccaggcttaagggatcctcccccttcagcctctggaatagctgggatcacaggtgcatgccaccatgcctggctaattttaaaattatctgtagagatagaggctcactatgttgtccaggctggtcttgaactcctgggctcaagcaatcctcctgcctcagcctcccaaagtgttgggattataggtgtgagccactgcgcctggctgccagtattgaatgtttatttcactaggttttcttcttttctttggttaaaaaatcacttttttctggcttactgttttttgcttctgtgtgggaactcaagtctgtgacgcaactttcaatcctccatctttgcacaggagttgacccagctgatcttgaaggctgctccttgcccaaacttcatcatagctctgagttccctccttgcccaaggagagatgtggccaccactgcacagagcagagccagcatggctgtcactgaggcctttagatccaggagaggacactgctcttcccagtctttttttttttttttttttaaagagagagagtctcactcttttgcccaggccagagtgcaggtgcgatctgtcaacctccacctcccgggcacaagtgattcttgtgctttagccacccgagtagctgggattacaggcacccgccgccacacctggctaatttttgtatttttagtagagaaggggttttaccatgttggccaggctggtctcgaactcctggcctcaagtgatctgcctgcctcggcttcccaaagtgctgggattacaggtgggagccactgtgcccagccccttcccagtcttgaagactcctgagtgaggacctgggatggaggcctgataactgcccatctggtgtccacaggggagcttgcagggtggttggcagagatcagccaggacgtggtccaccatagctgtcatcaagggtcagcccaggatgcaggggatggctgtgggatctgctctgtggcccctggagtggtgcggaaacctgggctatgtgagctccccaactctgggaagcgttcctaccacttcccagacttggcccttagagagcctcttggataagccctttctacctggctttctgggctggacaaaccaggccccaccaggggctgtctgagaggggctgagacaggcccactcgtccttcctctgagggccccacctctctgccaagatataacaggtgtctgttggctggcagcacggcccaccagaagagctcacaatctcagccgaattgtctgggaggacgcaaaggttttgctcccttcactgcctcagtccccacctgcctgcccactggcttgttgggctgctgccggcccctggaaaccaggcggtgccctcgtgccccaatgccagtccttgcaattacaggttggcaagtccagggacaaagcgtgccagacggtgcagcagcttgctggcggctggtctgtgtcctggggcctgtgtcctgactggctcaggcaaagagatcgtccgtgagggaggaggtttgggtctcagctctgccccagggacagcgagcccccaggggatactggccttctcccttctcggtgggcccagaatccattctttgcagttcagagtcagttaccgcccagttggaagactgagctgaaccaagattgaaggcaccgcccccgccaccccacaggggctgaccctttcctcctgcttcctcctcctgctgacctgtgcgtgcaggtggacgagaggagaggtgtgcgtgtacgcacatccactcttgtgcatggatgtgcacaggagtgagacacaagcatgtttgtgtatgtgtgtgtgtgtgagagcataattactgtgtttatgatgagaccgcaggtatgcgtgggtacatgccaggctgtttttcggcaagtccaccccaacgagcctgtgccagggtttatagtcatcatctttctggtgccctcgccacacatgttttggtattttgaatggctccccgcatatgtacgtagttgtggcgtgtgagttcttcgtgtgtgtctcagattgtgggtgtccgtgtgtgggtccatgtgtgtgagtgtgcttgtgtgttggtctcacgtgcacttgtgagaggcctcggctgtgcgtgtgtctgggcatgttggcgcggccgcatgtgtgacagtgtgagcatggatacttctgtgtgtgggtctctgtggccggggatgactaaagccagggacatttatcatcactttcctagctcgagggggaaattctcttggtctggaatggcagaggccaggggctgaggggctccatgtttctcaggctccaggcagtgttcccaggccctatctcccagagggatctaagtcagggtgcagggaggccacacagactctgaggagacaggggcagagtcagatttctgtttcggaagtcccctctggggctggtgtctggagggatggtggggcctgggaaactggggaggagatggccggggaggcctggagtgcactggccagcggccatgggcaggaggaagaggcagattcgaggaacgtgcggatgcaaaacggacagaaatcagtgatgaggggagtgagggtgaggaaggcatgtagggaccccccaaccccagcgtctggcctgggtgatggggagcaggtgctattcctgagccagaggggatcagctccggcagcttgctggtgaccagtccgcgcctggggcctgtctcctggctggctcagccacactgggcaggaacagagatgtttggggacaggggagagaatgagtttaggcagctgttcagtgtgaggtgcctgtggccgtccaggaaggacctgggactgcagagctgagatgctcctgtaggagcagcttcgaacagtcagctgaattctacaaaccagggccctttttgtgtgttttctttgcttttgagttgtggagcccgggtttgaactgctcatggaagccactgaacgctaggacccagcatgcactggcctgtgaggagccccagtgcaaagcggggttaccatcttaacaagcaggggctgctggtgctgaagggccctggtggagcatctggggcaccctggcgtcgtaccgttggggaaaccaaggcccagaggcggggaccaccccaggcccgctcagcaaggcagggtggggctgcgcccgtccaccccaggaggtcacaccccttggctgtggagcccctcctggagctgagtcagccctggtggccgctgccccgggagactgtaattacaggattagaaggtggcctctccgcagctgagccctttgcccctcaaagctgccaagtggagacgaggatttgttggtgcggtgccggcctccaggtgtgtctgaggagacctggcatcgtcgggcggcttcttcagcctgaaaggccccattgtagctgcagcctccctctgatgggctctattttggggccgggatccaccctgtcccagctggaggaaggaaagggtgtatttcagcatgtcctatgggtgtggggtggccggggagagcaaaacggggagctggttgggggacagcgtgcctgggctgcacagaggtcacagaggcagacgctggcaatgtgaaggggggagaggcctggagggccaggtgcaggtgcccggaagaagtcagagggagatgggtgtgagtcgggctgggctttcatgtggccccaggaggcagctggcagaccctgctaggctggaatgtggatccgcagctgcccgggccccgcctgagacctgcctgccagcgacttcctgattcctgcccctgtgggtgcccggccccatgtcctaggcctgagggagacccacctgccctcaggggcctctcagtttgggtgccagggaccaggcactgcagtcccaggggctgggttaggccaggagagcgcatggctgctgggactccttggctggttctgctctccctccaccagagctgggccgcgttcctgtcccgcccggcatggtggccacatcccagctccttgcctccgctcccgtgggtccccggctggcgtggtcttgtggctgtcctgggcccgtcctgatcctgactgtccttcagggctctccctggcgccacctctgtccaggggccccctgcccatctcggggtgtcctctgattccccagtgctagcctcaccaggtactgtggatgctgggaacccccactcccctcttccccccgtggcctcttcaacctcaccatgcacaggccatcacggcgtggggggtggggggcgctcaccaggacgtggcttgatgcatgccctctggcctgagtttgtctgtgaaatgggtgtaatgacgtctgccttacagggcacctgacctgaggggttagacagggtcacaagagaggacagggctggtgcgtggcaggtgtttgggtggcagtccttcaggtcctccatcctgggtgctccctggccactgatcatcaggtctctgggtgcctgagcctgggctaccctggggacagccccgtgatccaggaatgactaattccacccctgcaataagctcttggaagctttgagaaatgagactctttttttctctctttcttcttgctgcttcattaaactcttcttgagtgaggggaatgaggattgtcctaatcccttggcacgaggtgaaggcagggggcgtgttctgggcttgtaaccagaggacactgggagcagggctgggggtgggcactgggcaggggccggaagcctcacattccaagcaggctttacccaggggcagctggtgaccccagacaagccccgtcctcgaccaggctcggtttgactgtccgcatgatgggtgtaccaggcctcgcccacctccctgtgctgctccaagggaaggggatggcccggagggtcctttggtggggtgcctggggctgggcacgctggctggcacacggtaggtgccttatcagtgtatacggacttttggggaaaacagaggaggggtggacagcctccgagttgtcttttactctttgtcctctaaagtctgtttttttttcacttttcctttttttttttttttttttgaggcggagtctcactctgtcacccaggctggagtgcagtggtgtgatctcggctccctgcaacctctgcctcttgggttcaagctattctcctgcctcagcctcctgagtagctggaactacaggtgtgagccaccacaccctgctaatttttgtatttttagtagagatggggttttaccatgttggccaggctggtcttgaactcctgacctcaagtgatccgcccacctcagcctcccaaagtgctggaattacaggcttgagccaccgtgcctggcttaaagtctgttttcttacctttaaaagtggcctgggaggaggcctagctgcttcctcctgggccccagcgagggactccaggggctggacactcgcttatgggtcctggctctgtctacctaccgtcaaggctgctggaactggaaaaatagttctaggccttcctcgctcactccaataagtctcaataatgcctttctctgtagcgtcccagtctctcctctccacaggtgggaagcaacaggtggggttggtgactgggatctgggaatcctcacccaggccaccctctgtccacaggtgttcctgggccttggggagctgcttctgtcctgcaactgggcagtggttgccgacatcctgctggtaggtgtgggagtcggggtggtgggctgagcagggggagctggagaggattgggcctctgctgctgagcagctgggcactggcggcgacatcagagaccatacattaggggaccaaagccattcacggttatcttggaccagaggcctctctgacactctcaaacatctctgaccatcatcccgattttgcagatgaacaaatggaggttcagagaaggcaggtgcctgttccaaagtcacacagccccaacgcagggagccaggaccggaacctaggcattttgactccctgggctacttccctccctcttttcttttttgagacagagtttcactcttgttgcccaggctggagtgcaatggcctgatcttggctcactgcaacgtctgcctcctgggttcaactgattcttctgcctcagcctcccaagtagcagagactacaggcacccgccaccatgcccggctaattttgtatttttagtagagacagggtttcac[141 bp omitted]aggttccttggcctctactctggggcgtgcagacgggatgccatccttcagggcagtagccactgaggcccattgtgccagcccacaccagctcgtgtgtcacaggctgccatgcaaggatcagccctgcctgtaagaggcctgacactgtcttgaccacatggctgctggtccagagtcccacacggcccctccctgagccccatgctcttcgtccagcctccttgcctccttctgggaggcatacagggaaggactttgaacacatgaagggctgtgcctttgtagataacgcagggccctgggcctgtgagcaccctgagagccttccttctgcctcctggcagcctggcacagtctggtgctggccacaagggaaatggaccagactggcagtcagctgagagctgtcctgagggcattcaatgccgcggcaccagcctggattcagaaaacagacctggctgtcagccctggtcctgccacttatgggctgtgtggccttaggcaagtcactgtgtgtctctgagcctcagtatccggatgtggaaagtggggatgataatggcacctgccttatggattgatgtgagggtgaaatgagaagatccatctgcctggcacagagaatgctggctaggattctcacagcaatccggaattttccattttctcattttctatcccccaaagaaatcatggtgccctagaatctgggtttgaaagggttatgggcatgtatagtcgttgaatctgtcaacaaaccctgcttgaatactactgtggatggggtgctcactccctgccaagatgtctgcccctccccggcagatcccctgacccctccccacggcccaggcccagcgagtgtggagaggcctgccctgtctttggctcctgggtgagtggatcagctgcaggactggcaggtcttccctgcccctccctccagacaggagacttgggctccagcccagagtcagccgcagacctgctacatggccctgggcctcagtttccttgtctataaaaggggtaatcaccacctgcccggtagggtgagcaaggcggcctccaggaatgctcaggaaaggggaaggcattggcaaatgttttattcatgggattgtccacttttaggctcagggagattaacatccccccagcatagctggttctctctgaggtggtccaaacagagctgcacctgcccccacagcttccctggcctgccccccacggcgcagctccctcttccacatgacagccccacagatatgtgaaggctgcacccgtgtcccccagcgtctgcatttgtaagaatgattaacctggcagagccaggctctttgtggggttaaagaggagagtgtgtgctggagagggcgggtgggggaagggtggaaggagggttaggggctggccagctgcacagttttacccatttggggagctgcccagggagccggctggacaggaaccagcccacctcagggctccctgtggcccttccttggcttggaggcctccagccacaatgctttgcaccaccatcccagagcctcccgcccccttccctgccttcccacctgcccggagccccgtggccaaagatgccttttggccttcggggatcagagctgagcaatccttgtagcccctatagttcggttcctccatgttgctgcttcctccctgtaaaggcaggtggtgggggagccgttctgtgcagtggaggggcagatgccagcttggagcagggtgaggagggtgagggaggggaagcaggacaccgagggtagacaattcccttgaggagctgagctgacaggagcaaagggcatggtagctggagttggcagaagatcccaggaagctggcattgcttttcaagaggggaggacagaacagcctccagggagcagagaggggcaagcaggaggagagagggggccatgtttgagggtgagctgggggtggaatccagcactgggggaggaagtggcctcccagcagagcaggggcaggaagtgtgtggggacagggtctgtggcaggaagtagaggaaggtcccctttgccggccggcactggctcctgagacaggagatcggcttctctttcagcaggggcccagggagggaggaggccttagggtgtgtgtgaacagggtccacagaacaagggagcaggaagctaagggcagggcacgttcacgtgaacagctttgggcggccaagaaagccacgaggagctgataggaaaatgggtggaaactgcaggtgtctgggtggttggagcctgtgggttaggtcagagggcagagggcagcagagcccaggctcgaggactctgcagcagcccatctgctcccactcccagcctggctcctcactagctgtgtgaccctggccaagtgactgaacctctctgggtcttggtttgctcacctgtccagtaggtagagcggtggcaaccaccattgacaccccaggctataaggatagaatgaactcacacctgcgtcctgcagattcctgagtgggcgtgtgggccccactgacttccagatcatcccttccttgggacactgctctctctctctctttttttttttttttacttttgagacggagtctcgcactgtcgccaggctggagtgcagtggtgcgatctcagctcactgcgacctctgcctcctgggttcaagcgattctcctgcctcagcctcctgaatagctgggactacaggcatgcgccaccacgcccagctaatttttgtatttttagtagagacggggttcaccatgttggccaggatggtctcgatctcttgacctcatgatccgccccccttggcctcccagaatgctgggattataggtgtgagccactgcgcctgtccaggacactgttctctttgatgccatctccacaatggggagaatccaggttatctctggagaagggacctcaggggctctccggtccggtggcttggagacgtcattgtgcatgagagtcagatttgagggagcttgtgacaaacccagattccaggccctgtgtcctctgagtctgattcagtgggtccgtgctggggtccagggacctgcatttctgatgaacttcccaagtgatcctgccgtagcattccgtagagcacgctttgagaacactggtctcacgccgcaagctccccagtccataaatgctttgccaaattctagccatccccttgttgacatacgcctccaatggggagctcgttctgcatacctcgggcagcccctgcctctcggggggtttctgttgatgaaaatgatttggttcagtcacagccaagacccacctctgccagcctccccttggccccgctgggccatagaggggccctgctccctggagactgagatcgtgtcccctgaacccgcatctccccaggcagagctccctgcctcccgaaacctagtcatgaggtcttcagctccctcccagccctgctgtctgtccccgccccactcaggatggcccagagccagctcaccccaatccccctccaggcaggggacagtgtaagcaaaggtgtggagggaggatcccaggggcacgatctctggatcccaaccagttggggggctagagcagaaggggagctcattccctctttctcagccctgtcctctggggtcctggaatccagccacaggctcatctcccacccctcagcagacgtccccacagttccccggagagttgtcacctctgcgttctccccctgccccaggtctccatgcttccctgctcagcctctgccccccaggtagctgtctgctcactggcctgtctcaccctctcaggggcgtctgggggcgaggcctgggtgggggtgcaggaggcaggctgcctggtggctgctgctccgacttgctgcaagcccttgggtggccctggtttcgccctcggctataaagggaacggcccttctaagaagggagagccagaaacagaggtgtttttgtctcagaatagagtgagcctggatttttgggaacccaaagcctcttatttctgaaattaccccctgggctctccagcttctgtgggcccagccttggctgctggctgcacggagacaatgaggacttggaacaggctgggggagacccacctctctcgccactggcagcagtgactgagctgggcccagcaggttggggttcctgggagaggaggaaggggccagcctacctggacctaactgtgggggtcccagcagccccagcctccatgtggacctttctgaacattcaggttcctccctccaggaagcctcacctgccttcccagagccaccagtgagtaatcacataattatggggtgagaaggaagtccttggggaaggtgcaaagctgttggtcagttccttctcaggcctgttgacagatcctggtgatggcaagaggcccggtttctcttgccacctgtacatggtggctcagtcccagtgaccctgggaccagcgagtcactacagtgcctcctgccactctgccctgcccaccaccaaaccccctgcatctgtcccctgggattctggaatccagagatcgtgtccctgggatcctccctccacaccgtcgcttacactgtcccctgcctggaatgcctttccccgtctctttgccagttactctgccatccgtttacagggctagtgatgaacttgtcctcctcatctttctcagatttctgaatgttctattacaaatgcataaatattgctagaaacaccggctcctccttgcccatcacagcagagtggtcaaaaggccagatcctagagggagaaggcctgcaatcctctctcagccctgttatttcaggctgggtgatgttgggcaagtcacttgccctccctgtggaggttttcctcatctgtaaaaatgcaggtgatcatcatctccctctcatgggttgttcaagttgatatataaaatgtatacagcaagcattcaataaatgttggcaattattattattttattattattttttgagacaggatcttgctctttcactcaggctggagtatagtggtgccacctcggctcactagaacctccacctcccgggttcaagcgattctcctgcctcagcctcctgagtagctgggattataggcacgcgccaccacacccagctaatttttgtatttttagtagagatgggatttcgccatgttggccaggctggtcttgaactcctgacctcaagtgatccacctgcctcagtctcccaaagtgctgggattacaggtgtgagccactgtgcccagctaatattgattaactcaaggcctcagatcatggacacctaggtcttggggatacggctccagggtgtaagcgcccctgtggctgtccagttgggttcatgtgaccatgtggtctctgcttgagtcccctccccctccctccttccatcccctgctgtagccctgggttctggcagactttctcctgggaatagtctcccagatggacctacttgagttatttggttggcaaactttcagctagtcccctctgtgcctggtgtcttgcagggaccccaagagaaattaagggtctttgttgcccacacaacatagggaataaggggtggtggacagagaaagggcccctcccagttctgggagacatgcgttaattaggggtgtgcataggagttgcgggagctcagggcaggtacctgaactctgagagggcttcacagaggagatgaccgaaacgtaagtcctaaatgacaaatatagatgctccagctggaccagagagtggaaggcacgccaggcagaaggcgcagctgagttcaagggcctggagcatcctgtctcagagcgttattttggtctgatgtccacacgaagcctccaggtagcagacgaataacgataatgaataaaactctcaagatcagtaccattattacccccacttggggatggagagactgagggaagaaaggtgaaacagtttgctcaaagtcacacagctagcgagtggggatctggatcggaacctgagtgtgtgacaccagagttctttattttttttattttttttttttttgagatgggattttgctcttgttgcccaggttggattgcagtggtacgatctcagctcactgcaacctccgcctcccgtgttcaagcaattctcctgcctcaacctcccgagtagctgggattacaggcatgtgccaccacgccggctagtttttgtatttttagtagagacagggtttcaccatgttgccaggctggtcttgacctcctgacctcgggtgatccacccgccttggcctcccaaagtgctgggattacagacgtgagccaccgcgcctggcccagagttcatcttctttatgttctcagccttgtccgtggagtcgtgcgggcttctccagcaaggccgcctttggtctctgccccaggggccttgaggttcctgagaggactgagccctccgtaccacccctgcccaattgcctgcacatgcagacacctggcatgcacccgctcttcgccctgcccgcttgtgctgctgcatcctgggcccctgagctgggacaccccagcctcattcactgtggtcacatgcatgcctggttccttcccagttcaagagcaaactctcaagaggggtggccctgatcaggggccttggcacccccatcctggggcactggggaagcttcagatgggcttgatgtcttgatgttctggggtgggactttagaccttggggaccgtcgactccctcccatcccactcacctgaatggcctgtcactcctccaggcaggtccttggcaggtggggaacagcaggcaagggtgccctcacttggggtgcccccctgctgtgcctatgttttgcagtctgtggtggtgcccagatgccgggggacggcagaggcacttcagatcacggtgggccacatcctgggagacgctggcagcccctatctcacaggacttgtaagacgtgtctgcgtgtgtggggtggggagggtctgggggccaggctggtgggcctggcagactcatcccttctcctccgcagatctctagtgtcctgcgggccaggcgccctgactcctatctgcagcgcttccgcagcctgcagcagagcttcctgtgctgcgcctttgtcatcgccctggggggcggctgcttcctgctgactgcgctgtacctggagagagacgagacccgggcctggcagcctgtcacaggtaccctacccattgcaccaggcccggctcagggccggcaccctagggacagacagcactggccaccccctgaatccctggccagtttgtttgttcattcatccagaaatgcttagtacacccctgctatgtaccagggaaggttgcagatgctggggagtgaaagaatgaggccaagtccaggcccctgtagaaactgacactgtagttggtgaagacagaccagaaacagaaaaggttaaagatatagcatgttcagggtgacgagtgctatggagaggtataaagcaggaaaggaaggagaaaggggccgggcgcggtggctcacacctgtaatcccagtacttggggaggccaaggcgggcggattacaaggttaggagttcaagaccagcctgggcaacatggtgaagccctgtctctactaaaaatataaaaattagccaggtgcggtggcacacacctgtagtcccagctactcaggaggctgaggcaggagaatcacttgaacccgggaggcggaggct[131 bp omitted]gagcaaagatctggaggaaacgagggagtgagccgttcagcgacctggggaaagacgcttccggcagtggggacaatcaatgcaaaggccctgccatgggaatgcacctgatatgtttgaggatcagcaaggaggccagtgtggctgcagcagaagcaagagggacagtggtaggggtgagggatacggggccagagcaggcagtccttgtaaagacagtggcttttgctcagagtgagacgggagctgctgtggggcttccaggagaggagcaccgaggtggtctgattgatgttgccaaagcatctccctggctgctgtgttgagaacagactgtaggagggtcagtgttgaggccgagaggcatagccgactccccttccaggggagagtggtgcctagaccacgccagtggcattgaaggtgatgacaaggggttggatctggaatgtattctgcatttgggacagagaggatttcctgacagcccgtgcccaggcccaggcctggtcccaaagcaccttctgcaaccttcgggcaggctgagcatctttcctcctgcagggaccccagacagcaatgatgtggacagcaacgacctggagagacaaggcctactttcgggcgctggcgcctctacagaggagccctgaggtccctgcctacactcgtcctgcctgcaagcctcccgttggtccccacagcagcagtgcctcggttcctctttggctgtcctcggggactccggctgaggcacatctgccacttttgaattcccggctggagagctggcaggaccctgtggctgggctgggaatggagctgtcagcactctgcgtgggaggcctgggcctgtgcctgcatcccgctcaaggctgccccagcctggggtctccagcctggctgctgctgggccctgaataaagagaggccagtacaaagcccatggattttgggcctgtagacagccgtgttatttatagcctctcgtgcctctgctggaggggaagtgggtgaggacgggatgggcagtccaggccaaggatgcagggctgtcctgaagtggggaagctggggggctggctcagcatgggtctctaggggtccgcagcctggacctcccactctgacccagcttctccattctgcaaagtcacaggcacaggacaccctctacgtgattccactctttgttttgttttgtttttgagatggagtttagctcttgtccaggctggagtgcagtggcgcaatctcggctcattgcaacctccgcctcccaggttcaagagattcttctgcctcagcctcctaagtagctgggattacaggcatgtgccaccacgcccaactaatttttgtatttttagtagagacagggtttcaccatgttggccaggctggtcttgacctcctgaccttaggtgatccgccagcctcggccttccgaagtgctgagattataggcatgagccaccgtgcccagccaactccaccctttgaacaaaacgtgggggctgaatcttgctcttggagatgagtttccacttgggtgctggggtggggatgtggctccaagttccagggaaccacgcagaggaacccacgcctatacagacacgggcgcagcggccccagaaccctgctgaggacttgagtggccgtgcagggatcctcctggcctgcccagttctgtagccccggtcttccctgggtccacgctctgaccccagcacagcgtatggggagggctggctctgcggggcccacgcttgccactgggttcagagcagctgggctcagcgggccctgtgggagatcgacagcttccaggcgggcagcagtggggaggcttgttctcatgttctttccgcctcccctggtgcccagccaggcgatcacttgctcactcaccgatggccaccttcgctgtgccaggctgtgcctgtctcccagcagctgcaggcagagcaacgaccgagactcctgcgcagcccctgatgcttgctgctctgtccctgccttctgtggggtgccccccagccctccctgttggctgcaacaagccccaggagcagggccgcaccacagccagccctccctgcaggctagccaggcccttgaccgtgactcaatgcttggagcttatgcaacaggcagcccttcaagttacaaggtaaaagatctgtgaggatattttgtttttcctgagaaggaggcagcaactgggcaggagccaggatgccacggtccctctcaacattcactggctgtgtgacctaggtggctccctgactccctggctgtgtttgagaggtgtgttgacatggctttctagcctgggcctcatgtgattagcacaggctgggtctagacccacagaagcccagctccagggtctgaaccttcctcccaacagccccagggaggacccctgcaaggcgaggctcccggaaaatgagtgagggccgcccaagggtcagaacactcagctgggcacagcggctcacgcctgtaatcccaacactttgggaggcagaggctgatgtattgcttgaggtcaggagttcaagaccagcctgggcaacatggtgaaaccccgtctctaccaaaaataccaaaacatacctgggcgtggtggcacgcatctgtggtcccagctctgggaggctgaggtgggaggatcgcttgatcctggggatggggggtggagttcgtcgtgaagggagatggcaccactgcactccaacctgagtgacacagtgagactttgtcttaaaaaaaaaaaaaaaaaagaacaccagctgccacctccccacccagagtccagtagaggaagagcaagaacctcgttcatgccaactctacaaacatgcattggtatcggcgggtgcccatcagggtgtccagcagtgaatcagactccagccctgcccttggacctcgcagcccacagcaggacaggcaagtgtggcacacctatgggcagagtaagggcttccgtgccccagaagccttcaaggaagtggctttggagttggtaacaaggtggggggcaaagggaattctagatgcaggggatggacccacaaagagggggagagtggggcagaagatttgcagtgagtcatggaggggtgtggtatggccagagaggagggtgcgtgtgtcattgagcggggagaggaggtgagagaggccatctgggatcagaggggcgtcagatgtaggtccaggagctggggctttaatcctataatccagggtagtttcttatgactcaagtgcattctgatatttgggttgctgggcagggcaaggcggtacttcccaaggctgagccacacgaggtgcccagctgggagtttataggaagctattgtctaaagtggtttggggcagagtgggagctctggggctggtggacgcggcaagtgacagagaccaatatctcctctgcagccaacccagactcccacctcctgcctctttggggccagtcctggtgggtcgaggttacgataacagcctgggggaacccagccactcaggctggagtggagtctggtaaacagaacacatcttcctcgcctaaaggcccttgttgggtaatctcagccacgaatactctggacttgtttgttgggaatgtcaagaggaggaaaaatgctgttcagcaggatgagtccttaagcctgacctgactctctttatgtgttaattgctctttccagacataagctgcattccagctgtcaggtattatccaggcatggaggtatctctgtgtgcgtgtgcctgtacctgtgtgtgcatcaccatgttggcgtgtggccacatgggggtatgctagctattggaaccaataccaacaggtattagtaaagctttttttttttttttgagacggagttttgctcttgttgcccaggttggagtgcaatggtgcaatctcagctcactgcaacctccgcctcccgggttcaagcgattctccttcctcggcctcccaagcagttgggattacaggcatccaccacgcccggctaattttgtatttttagtaaagacggggtttctccatgttggtcaggctggtctcaagctcccgacctcaggggatctgcctgcctcggcctcccaaagtgctgggattaaggcttgagccaccgcacccagccttaatttttcatatttttagtagagacagggttttgccatgttggccaggatggtctcgaactcttgagctcaggcaatccacccgcctcagcctcccaaagtactacaattacaggtgtgagccaatgcgcctggcctaaaagctctttttccactttgtcctgaaggttgagggggttgaacctgtgtgtctggattcccacaccctaaccctggcttgttgctctgcaacatcaaatattggtctgtttcattccctgaagtgtttgactttgctttgtgcctgggtgggcttgggaggttgtttaatctaatgcagcctctacagacaaagctggcagcaggcagctggaggttccgggagccatgctttatctcagcacagacaggtgtgtgactgcgtgtgctcctgtgtgaccatatcagtttgggttgtggggttgtatgcaacggaaacagactgactacctctaccaggcaaaggatgcattgaaagcacatcaggaactcatagaattgatgagaaggttggagattcaggagccagggttcctgggccatattattttggggtctgtgccagaactccagatattttatccctattcttttgccaccctcctcaagatttaaagccctgggcaagagattccagttgggttagcttggatcctatacccatgccttggtttatagccgcattaagaccagcagaccagtgtgccgttaggaagaggaaggaagtctcagcaccaaaacaaaacaggaattaaaacaagatgacaggctgggcgcggtggttcatgcctgtaatcccagcactttgggatgccaaggtaggtggatcacctgaggtcaggagttcaagaccagcctggccaacatggagaaaccccgtctctattaaaaatacaaaaattagctgggcttggtggtgcgcacctgtaatcccagctactcaggagggtgaagcaggagaatcgcttgaactcaggaggcggaggttgcagtgagctgaaatcgtgctccagcccgggcaacaagagtgaaactccttcttggaaaaaaaaaaaaaaagaagaagaaagaaaacaagatgacagaaaacaaaaacaaaggtagcatccactacaatatctcgggcaggccactggccatctctgaggtgcagcctctccatgggatggggaagaggctggactcgatgcccttcggtggagtctttatttctgatagtctgcatccatgatgaaaagagactgaagcttctgtaatgtagaaagtgttaaaaatgttcaaatggcagaacaggaacttctgtgttagtggggactcagagccatctgttctgagcaggagagagaggcagagacgaagcgttctgagcaaagataggctcgggctgggggagggaacgggggccccaaccagtcctcagcttggcaacagcaagagcagagaggaggtgccttctccccaccgtgggtggtgacctgcggggaaggctaatcaaagggtggaggcaaacagcaggtggaagctaatggagggtggagtcaatcaggaagaaaatgccttttccagaggaaccaggagacgaatctggtttctgagtcattcagagcaacagacgcgtgatgcaaatcaatgtacatttcctgagcacctgctaaatgtcatttactcattcaatcaacaaacattctttgagcacctcctctgtactggctcgtggagatgaatcagaaagggtacgggccctcgaggctcacggtctgttggtgaagggcgggggacagattcttgcacagacaaaaatcagcacagtgttggtgtgatggaaggatacacaggttactcaatagcccagaggaggaaatggttgttcaggtgggccggggaaggcttcccggaggaagctgtttctgtgctgggttcctgaaggacaagtgggaagagtgaataggccacacaggcagagcatgcctcagtcagggtcggggtcaggggttgcacgcgggatgctctccatggtcctgaatcatcgctgtgctagtgggacaagggcttttttgttgataggaggacaggggctatagaatagtgccccaattcttgcccctcccccaggctccaggaagtattataactgtgagttcaagaagctccatgttcagtgtggcagagggtaattttgagagatgggccgtaggatctgaggctggagattgtcatgggttgtgaaaagttgtgaaggctcttggagatcattaaggaatgtagtttttttttttgaaacagagtctcgctctgtcacccagactggagtgcagtggcgcgatctcggctcactgcaagctccgcctcctgggttcacgccattctcctgcctcagcctcccgagtagatgggacaacaggcgcccaccaccacgcccagctaattttttgtattttttagtagagacagggtttcaccatgttagccaggattgtctcgatctcctgacctcgtgatccgcccgcctcggcttcccgaagtgctgggattacaggcgtgagtcactgcgcccggccaggaacgtagacatttttaaccctatagccagtgaagagccttagaaaggttttgctcaaggtagtgatgaggtcctttgtgggattcagaa[133 bp omitted]caacatgatgaaaccccgtctctactaaaaataaaaaaaattagccgggcatggtggtgcacacctgtaatcccagctactcaggaggctgaggcaggagaattgcttgaacccaggaggcagaggttgcagtgagccgagattgtgccattgcactccagcctgggtgacagagcaggactccgtctcaaaaaacaaacaaacaaaactggagggggatgtgggaacaggtaatgttgagctttacaagggtccaggtaagacacagagaggcctgagctaagccagtgggcaatgtggacgtggggagatgttcaagagaggaaattgaaagcccttagatgtggctgttgaggagaaggagccccacatggctcccaggctttctgcttggcgacagtgtggatgatggtgtttttgacaaaagataaatgataccagagtgggagcaggttgggggaaggatgacaagttcagtttcaaatgtgctgagcctaaggtacatgtgggatatctggtggggggcacgtgtaggaggctgcatatggatctcgtgtttggagatgaggccctgtctagagatggaggttggggtgtcatagtcacatggatgatcattgaaagttgaggccacagctgcacatggtgctcacccctctaaccccagcattttggtaggctgaggtgggaggatcacttgagccctagagtttgagaccagcctggtcaacatagtgagacctttttcctaaaaaaaaaattgctgggtgtggtggtgcacgcttatagtcccagccttttgggaagctgaggtgtggatcctcaggagaggaagactcttcttttttatatatatatttttattttttattattatttttttcttcctgagatggagtcttgctctgtcacccaggctggaatatgaaagtctccgtttctctgtctttgctcctgtctgtcttggctctcttttttttgttttttgtttttttgttttttgttgttgttgttgttttgagacagagtctcactctgtcacccacgctggagtgcagtggtgtgatctcggctcactacaacctccgcctcctgggttcaagcaattctcctcccaagtagctgggatgacaggcgcatgccaccacacccagctaatttttgtgttttcactagagatggggtttctccatgttggctaggctgatcttgaattcctgacctcaagtgatctgctcgccttggcctcccaaagtgctgggattacaggcatgagccaccgcgcccagcatcaggaagccccttcttaaggaggatcccttgagcccaagaggtcaaagttatgatgagctatgattgcaccactgcgttccagcctgggtgacagagagagaccctgcctcttaaaaattttttcaaaaaaagtaaatttcaggcctaggtgagaggctgccaagggggaagggaaacaaccgaggcctgagccctggagacactcccatgtgggaggatgggcagagggcagatgggctgagctcccaattaccagccaaggaggagcaagtgcattctaggccagtgtttctcagagtgtgtcctgcagagctctcgtcttgcaagacattctgtggtcacacacacctgggaacgtggcatcctatatctccctctgggagactcagagcatgtattctcatagtaaaggctctcaaaagtccctaaggaaacctacttttctgtgtttatcccactacttcccaagtatgactgctctttgaataatggccattaatgttctgtgccccatttttttcttttttgtgtgtgttcttttctttttttccccccacttttgttttttgtttttgtttttgtttttgagatggagtctcactctgtcaccgaggctggagtgcagtggcatgatcttggctcactgcaacctctgcctcccaagttcaagcaattctcctgcctcagcctcctaagtagctgggattacaggcgcgccccaccacgcctggctaatttttgtatttttagtagagaccgggtttcaccatgttggccaggctggtctcgaactcctgacctcaggtgatccacccacctcggcctcccaaagtgctggcattacaggtatgagccaccacgccggcccccatttgttttgaagctgtgatctagacctaatgaatgaatatcagaaggtcctttagccacggagttcagcctcctgttatactgatgaagaaacagaatcccgcccagtctgagggcagcgtgcagtggaggaagtgctggattagagggtaaacacacctgggtttagtccatgcactgtcatttaccaggtgttcgaccttgggcaaattacttcttttccctgggcctcagtttcttcattggcgagatggaggaaagaaccctaccagtcctctgtctgacagccccaggttactgccagagcttctcagaaggctgtagggatttgtcctgggctgcacaaccagaaagggcttcttgtcctccctgtccctctgcccttggtggccccttatcccacacaaggacttattctagaggctgcctttgagttgaaaccccagtgaaacacagtgggaagggctggcttgcttggtggcagctcagaggtcccccaggtttgaaaggctcatgccaccctcttcccctgctctgggaccttcccagtggtgaaaagggaaggcagcagaaagagaatgctcccctttctgtcaaggccgaaagtgtccacctggacaggactgtggccaaagggatgaggagttttggggcacgggaaggggaccctgggcttgggtctagagttgtggttgtgcctccttcaccactagacacagttccacagctgggcagcctcccacagctggactctgtccacctgctggcaccatcacacacttacgagatcattgctggggccgggttctagccccacggagctcctagctctctgtccttgtttgttaatcacccgtcatgccaggccaccatggggaactccccccatccgcctttgcaggcctgagctcagcgagctggaaagaggcagcaggcaactttgagaatgaaatctgttttcctaaccctcccgtcacagtcattcatacccagcacgctgaagcatatttttagtcactttgcagaatttaaaatacacctcgaaggcgccaagaaacaccagcttggggattaactctgctcacaagagacagtggaggggggcggggggggtgcctcgtgctgtgtcacccgttggctatgccatgactcactgtggccgaaagcttcaccagatgcacctgcctgtggacgtggggtccggaaaagcctctagcggggagtgagctccagccctcggggatgatgccagagcctggggcagctccagccctgccacagcttcactgcctgttcgtaatgggtcacgtccgtgccctgggacttgtctgtgaaacacagggaatgattaactggtttccgagggtttgtccagttctaacattctgtcctctgcactttatacaggattttaatttcgattttaattccccaaacaggtgaatgggggagggaagggggagatcgtcacagagccacagcacctctaaggaggggtgaaaccgtgatgggatgtcaggaacacagaagcaccccaaccactctccataggaggcagacccccgccccgtcccaccaaggggaggtgaccacccgtggatttccagactgaatcccatcctgccatctgcccccagatacagaaatggaggcccagagagtgggtgtcatgttcaggatcatgccacacaccagggcagagctgagctaggacccagcctcctgtctgccactgggggctttgtaccctctctagcacatacctggaagtctgaagcttggagatgtggtccctcaggagggaaagccccttctgaatatcctgtttctgttgggccccaatcacagcccttgctctccccgccaggggctgcgggccactctgtggggcaagggtagggtccgggtgcccacacaggaatgggcccggggtaggttgggggctggatctgggttgccctggggaggtgggagacacagcccaccatgactggtggaggtctaggttctgggccctccctgaactggttaaatccgggcgtgtgagtatcggaggagccaccggctctccaactggcgcccctgactttagccatctgagactcctctctccagttctcccagatacgctaggctcaagccctcagcccggctcccagagcctccgccgggagtccacgcccgaggcaggggttgggtgaagggtactgagtaggtgctgggagccccgtcaccagcaccctgctcccagctccgtagccagagcaaaccctctcccgctccccgcgggcgttcgcggccggtcggccccggcgtgactgcgcccccattggcaggaggggctctgccgcccgggcccccagtccccgggccccccacccccagggcagcacgtgcggggcggggctgtggcccgagcccggagctgattgggcgcgggcctggtgggcggggccgggccgcagctgtcagagccgcggcggcgaacgaggcgcagcgagctgagcggtggcagcgccgcagccggggccggagcgcaggagccgacggggcccgaccaggatggtgcagtggcggctccgcggcgcacgcacgcgctgagcgggcccagcctgggccccgcgccccccgcgccccccgccgccccgatccgggccggcatgatgtgcctggaatgcgcctcggcggcggcgggcggcgcggaggaggaggaggcggacgcggagcggcggcgccggcgccggggggcgcagcgaggggctggcggtagcggttgctgcggggcgcggggcgcgggcggcgctggagtctcggccgcgggcgatgaggtgcagacgctgtcgggcagcgtaaggcgggccccgaccggaccccccggcacccccggcacccccggctgcgcagctactgcaaagggccccggcgctcagcagcccaaaccggccagcttgggccgcgggcggggggcagccgccgccatcctcagcttgggcaacgtgctcaactacctggacaggtacaccgtggcaggtgagcgagtgccccacccagcccgaggaccaagaccccaccccatcccaccacccgcctcgagggaggtaccccagagagcttttggtctcaggcctgctatctccaggccctacgtgaggtccctacggaccctctgctcaggcacaactgggcaagggatgcctccgtgcaccacgggtacaatccagctccccgctcatacacacccggggccaagggatagaggagtccccacccctggagcagcccgcgcgtcctctccagcccttgacggcccatccgttgtcctcctctccaagagtctcctctgcgtctctctgtctccttgtctctgcgccccctccgaccccagctgccggttcccgggcctccttcccttcccttcccccagcccaggtcgtctgtccgtccatggcccgtcagttccttcctttctccgccgcctccacccccctgcgtgcgtgcggcgagtgcgcgcgccccttgcgggtgtgcgctagggagaccgggtgtgtgtgcgcgtggcggcgcggttgtgtgtgagcgcgtggctgacaaaggctccgggctgcggggagcggagggaggggcggggcgggtccgcggcgcctggggacccaggctgcggtttgcagctggccctgtacagaggcctggagacgcctccccctgctctatggtgcttggggtgtagggtagggcgcaggcctctggagctagagacgtggagcctcatcctcagggagcatctctgggaatcagccttggggacgggattgggatcgatagaacaactgggttctagccccagctttgctcctaatgtgcttggtgtgtgaccttgggccagtctcagcgtgtgtttaggtctgtttgcccgtttgtgagttgattgatcattgggcctttgggggacgcacgtggttctggaattgccttctgctggctcccttccccagcaattaggggtgggtctaggggtaagaatttgccctagactgagctgctactggttgggaatggtggagctttgagagggaaggactttggccagactggcataggaaggggctccctgcaggaggagagcagtactgtgtgcctggcatgctggcccagaacctgcgtaactatagcttagtaaaatctggagctatcaaacacacacacaacagagagagagaggagataggagagagggaaggatttatttttggacagactctaaagagaactttgcggcaattgagggaagagagcccgggcataaaccacatgccacctggtgccttctctgggcctcagtctccccgtctgttgaatggagttttgtgtcaaatggaagggaagaattctgatgggagggcagaggcttccccctccccccattcctgctttcaaccccccttggctctctgtccttccgctggaggaaattggaagtgggtaccagtggcatcagtttctgggtcgagctatcccaaagagaaacttactttggtctagagagcaggaatattgagcacctcccaaaaacgccagccgctgtcacgcatgcaccatgctgccggggacctgggagcataagcgccatcctttgggggagaaatcagagaatacctgggacctgtagtcagttcacaaaaggcttctgtacacagatagggggaccaatgtccctgtacagcccccgttcaagatggccaggaaagtgactggcaaagctggtgttagctctaacagtaaggctctgcctgggaggaggtcttcccaccctttctcagctgaagaaggaatggtactacttctggcactgtagcgctctccaacttgttttttttctggccccagaccaccccctttgacgttcttaggggaactgcctctgccaggggcagagccagagagggtgggatcagggagggctggcacttatctgctcccacttctactcaggtctctgagtcagattgtcagcatgggggaatgagataggaaatttgtggtgaattggtaaagggaggtggggagtggtggctaagaggggcgtggggcagttagggaggaaggcccggaaagtcctgtgcaaacacttgcctgggctgtgcctccctccctctcctggcctggagtgggagctcacacaccaccccacccccaacacacaacagacacaggtttcctctccggataagcctggttgcccctctctctatggtagatttccccatctccacttccccaagttcagtttttaggaatatttattatctctatggtaactactatggcttgatgtgctagggccaggggagtgctcatcccaggcctgagtgcacctgttgctggctggcccagctgggacagagatggggatgcagagactcaattgctcagtctttgatgcttgcacctacctggccccagctccccaccaaagatggaagggaggtcccactctccttctttaactctgtcctttaaatctgttttttcatagtgtagaccagctttgtccaaaagaaatataatgtaagccacatattcctgtcaaattttctggtagccggactaaaatagtacaagaaataggtgtgattaattcataatatattttatttaactcaatatatccaacatatttcaacatgtaatcaatataaaagttgttagggctgggcgcggtggctcacgcctgtaaacccagcactttgggaggtcgaggcgggtggatcacctgaggtcggaagttcgagaccagcctggtcaacatggtgaaaccccccatctctactaaagtaaatacaaaaattagctagcatggtggtgcacacctgtagtcccagctactcgggaggctgaggcaggataatcgcttgaacccaggaggtggaggttgcattgagccaagatcgcgccactgtactccagcctgggtgacagagtgaggctctgtctcaaaaaaaaaaaaaaaattatacacacacacacatatgtatgttgttaatgggatattttgcctcccttttcatactaagtctttgaaacccagtatgtgtattttccattcacagcacatgtcaatatcacggtggccaggggccactagagtggacagtgcaggtctagagtctttgttgccagagttcgagccaaggctcttcagcttcccagccgtgtgaccttgaagacatcacctgagccttctgtgtgatcattcccctcccgcctgcctcccgggttgcgtgggataaatgagactgtatctcgagcacctgggacggggccagattcctaggagggcttcacgagtgccagctgccttctccttcatgcctctgctcaagctggccacgatgcctttcctgggatttttgttgttgttgttctgttttttgttctgtttatgacagtcctttcaggacacctttgcaagcccctcccttctccacagggctggtctccatcctgggaactctagtagcttctgccccagcgccacccggtgaacctgctaattacggcctctcctccgccccatgagaaccccctgagggcagcaggcctcagagcgggtgaggagggccaggctcctgtgcttgctcttcttaccgagcgttgcttcaattggatgaaattgaggtagcccagaaacctcttctaaatccttccttgcacctccttgcgcagatgggaacacagccatccagagaacaaagacacttacccaaggtcacacggggggcggagcagggccacaccagccagagcggcatcctctccagtcccaggagccccaggtggaggtaggggcatgacccttgcttctggcctgggaacgcagaggctctgctggcttaggcaagagccctttgggtagatgaatttcagtttaattgagccaaggcagtttgagctcccctagggcacatggctcctgctcctatggtccctagcagccacccactctgcattctgagcccactcctagctgcaaggtcaggagaaggagggagtccctcagacgggggtctcacgccccctctaactagctctgcttcctggtgccagagccacctctgccacccaggctgccattcttacctctgtgaaatggaagcagagctgagggtgtaggtggcagcattttgctcctggaaccaggccccacaagagggaggtggccctggccttgtttatgggtggtgaatgactatttgggaactgagatccttccccaacttctgtggggtacctgttctcttctcaagacctattttctttccctttgatccagcctggggcagcctgggcacttggagttgggtggagtgggggctgttgaggaaaggcagagccttgccctgggggagtccttttctgccaaagaagctgagactggtatccatggcaactgctcactaacacaaacccagaaggagcgatgagcatagggacccagctgggaacacaagccgagagggacttgggggcttccccagagcagctgagctgggtgcaggaggagggggtgccaggctggggctcactctcctattggctttttttttttttttggtctgtcctgttaagtctatccagaattgaaagatggggaaactgaggcccagggtcttttacagggtcacctggtgggtaggggctaagccaggccctgtcttgtggctctgtggctctctctttagataaggatggccaccttaaggataaacagtgcccctgccttgccctcttaggtggccttgtcctggccactgccacatctgcaccgtggagaaaccccagctgaggtgtgaggggcagggcatccagagtgtctgactggcaggctcagcacccaggtgaagcgccaggtggtctagaatgtcagcgcccttgtgactaactgcctgctgcccacttccttgctcctgcttccttttcaaggcaccttccagcaggctctgccagcccctccgctgtgctgtcatccatcagaggaagtgctttgaaacatagtaccttggtctggggccctggaccggtgatgggcctggcctgtgcctctgtttctcattttgtggatgaggcaggaaggctgcaggtctgcaggtgatagcctgttctgagagggaggctgccctgttcagagctgctcagaggaggagctccttgtcccttccccagaaccttctgcaataggaagtggcttttgtttctgcctgtgggggcctgaaatcttgaaggtagaagggggatgagagtgagggagtccaggagaacactggcccgatccctaggcttctggggctgggctccctcttaagctccaaatgtcttctgggctgagcttcctgttcctggctctgccagccttcgccagctttactgtgtgactggaggcaaattctgactctctctgatccctgaatccatgacagatgatttttgtccctctcttgctgttgtcagtgtcttggtcccaaggatagtgtggtgcacttggtctcaggaactccagtctgctggtccctggctctgcctgcacctcctttccccaggacaaccagatctgcttcccgggagctacagtagccaactgcgcttgtccctggtgggtctcagcggtgtcctctttccaggatgccgtctccagtgctctgggttgaaccaagtgcctaactcccggttttgaactgtgctctgctccgcctccatcacagcacctatccccatggagagtcaccatccccctctagccatggtcacacctgggacccccgcatgcataggagactgccccaggcttgagctctgttgactgagtcacagactcagttgactgagacttgggttgactcatacctgcctgacccaaagcacatccttctgggctgaaagggcactggtaggtttggacagctcaggtgaagggccaggcccctgtgctgacatcagggtttctccgacagtggctggtgctgtctctttgttctgaccagggctcacaatgagcctcagggcctgagtctccaggaaggaaatgggaggatgtagtcaggcagtccctgtctacccagtcctcagccctgacaatgaggccgcgcaacccccaagctgggcagagcggcttttctacatggcttttctacattcaagagggcacagtggcagctttgccctgtctcttctgcagatagggctggcccaggtcacacagtgaggccgtgtgaggaagagcaccggtctgctctgggcctggtcctcgcctggtggctgggaggttggtgagtggggccacaggggagaggagaggagagcatcggcatcggggcaagaatcaaacctggaacgaggcactagccagagcttggaggctggggacagggtcctgtcctcctgcctcccgctttcctctgccctcttggagcccatgctagggtctccccactcccactcctagagccacgaggtcttcgtgattccttccctgtcaggcatggggttcctgaatgggcttccaagaggcaaagagcaggatcaggctttgtcaactgaaaagggctgtgcctggggagaggtggggttacttggtcacacagctgtttccagcatccgtgtggggatgctagggtgttgaggggtgactgcttgcagcctttttgtggggagttgtcggggtgcaggtggggaacacaggccagatgtgggagcctggggaccagctcggcctggctcctgcagcctctgtcccgctcaccttctgcacgtcagcttccatccgaggcggggagcagcagtccctggccgccttggctactgaagtagcacgtggggagaaggctgagggtttgtgggcttgaggggagccattctgaggtctcttatctcttccccaccctcttccccaggcccctgccttatcctgtgtctggctggcatatcatgacccactggccacaccccctgtgggtcacgataaggctgtggccaccttatccctggcccctggtggtcttgggagtccctgggccaggacagggctggggaggctgagctggggaaggagtagccgtgcaaagcccccagattgctcaggcagagcctggttccagtaaagctggccccaaatgatagactagaaccacaggccagaggcccggcagcccggccccgcccactcttggcatagagacacagcagggaggagggggacactctgagctccagggtggtgtctctctagggctagcggggtctgcgggcaggactcgtgggtggggaggggtgtttctctaaggggccaaggctctgggctgggggcctcatcctcatggtctctgcagagactgatcagtaagctgctctgccattaatgacccagatttgcagggtggcttgggagtaggggaccagcagatgtagaacaaacccagttgagattcagaaatgaacccagcagggatgtcttgggattctgggccacttctgaaatgggcaacctgaggcccagctgctcctgaagatcacagcctcctgcgggcagacgggggcaggatcttgccctggggaagcctgggggtgagtaggagtgagtgtgcctgagtccagagcactggctcagggactgccttggcccagtccctaggctggtggggtgccagcggggccgggctgtgggttcccagccttagccatccagcgccaggtcagcagagccaggctctcaggcccctgtaattaccggggtgggagctgcagccaagcgggagcaggggtaagactcccagcgtgagccagcactgaggcctccacatggggacctgggtccctctgagagggactggtgaagggcatcagggcccatcctttcagattgctaggccctgtctttccaggcatctgcccccattttggataaaagaaaaccaaggtgggaatgccccattgttctcaggtcatagctggggctgtgtcctgtcccactagttaattacaaatgataacatttatgacatttattgaggacctactatgtgccaggcactattctaaacactgaatgtggattaacctacttaaacctcacaacaaccatatgaaatgaagcaggtcttcaaattaagccatattacagaggaggaaactggcacagagaggttatgttatttccccaaggtcacacagcagagaaagtgggaaaaccaggatttaaacccagatgctccagttccagagcccatgctcttgagaatttagctaagccacctgctgctctgagacaggctcaggtagggtgaacgtgggctgatactgactgtgcttggggaaagcagggggtacgcggggacaagcttgagtgccaggtgccctgtctgggctgcctaggaaggaagagacctcaggatcacgctgttggcatcttgcatttgaggctggcctgagccgagggctcttgaggtcagtgtggatttcctcttacaccttggcctttcgaggattctgtgatgtcagcagattgggcctggctggaggagggaggaggaggccagaagtcctggaatcggggcttgactcctctcggggctactgaagaaccagcagtgatggggaatcactgtgagtgtctggggcaagctgttgagtgagtcagggccagagtccatccagttctgggggtgcccttgaggttacaggcaccacttcaccaagagcctcagaggagagaggcgcaggtatcctggtagacgcgactttggatctgcgccctagaggtgaggcaggtcttaatggctagagagggatagcctaggaagaggcacagctgtggccagggctgggcggcctacagcctgtgatgtgtgattccagggaactcagagcagcctggccagtggtttccaatcacctgggcagtgcgtttatagattcttaggtcccacatctagaaagggtgactctgcagatttggggagggccccaggaagctgtattttaataagcaccttccctaaaggtgattgggattctcaggcaggtttggggatcttcccagtctctgcatttacacaggaagaaataggggtccagggaggtgaaaagtcatggctagcagcatttccctttgcctggagtcaggggctgtatgtgtgtgcggtgggcactgtggttgggagaagagctggcttagggccagaccgtggaggcctcagatgctagaattctgggcggcaatggggctgctaagtgtgagtgggcagccgtacccactgggccaatactcgtagaacagcgcctggcacaaagtagttggtggatatgtgtcaatatgtgcattgtcgctgttgttattggtaccattactgagccaggggtctgggccagtggatcttaaaggactgatggacgactctgaggccagaggtcaccagtgggccacagcgttagctccttgagtccaggcactgtctcggggtctctagaggcccagaccaggacttagaactcagtaggagattcgtaagagcttgtgagatcaggcagcaggagggatgccggctggccggcaggggctggaggcagggagtccagggaggaggctggacgataaagcagatggagaatcaccggggcccattcatgaggtggagggagccaaaggggtatcctggctgactcccagggtcctgcagtgtcctacagggtccgctcagggaatggggacccagtggtgagctgaggaatcagtcaggaggctgggaaacagggatgagagcgtccaggggttgagcctccaggaggtggttggtttcagaggaggaaaggaggtgagaatattgacttgggaagggaaagaactctccagagttcttagccaagtgtcgtggtccacgcctgtggtcccagctactcgggaggctgaggcaggaggatggctggagcccaaaaggctgaggctgcagtgagctgtgattgtgccactgcactttagcctgggtcagagagcaagaccctgtctcaaaacaacaacaaatgctgtcacctgtgaaaggaggagaggaaaggaacagctggcagaggggacaagtcagagctgttctcaccaccagggtgagggaggtgtgggcgtgtttgtgggctgctgtgcaggagccggaagccagggagaggctgagtgcacgggcccaagccaaggactgacccagcgcagcctccctgccaggcgagagagactgttggcccagagtaggggacgttggcctcagacaagaggtgagacctcctggggcttgggaggtacgtaacttgtcaatggatgttgttccagaatgttttcttgggtgatgagaaccctgtggctaggagacgattccagctgtggatttggggtatgcctggagaggcctgcattgtggctgtgttggctggggtctgcatctggggtaggaaccccactttgcatgcacgcctggcggggtgggcttggcctgagctgtgggaggctgctcctgggcgtgaggcccatcctgtgacccaccaaacctcagcctccaggaaagaggctaaaaataaggctgtggtgaagaagggaggggtgcgtgggcctgagccgtgctggagcccaaaggaaaatctgaggcgacccgccgagctgctgtgacacacgcttcccgtgccagcggccagcgggatctcaccctcctgtggctgtggccgcctccaggcccggaagagggaaagcaagccagaaaggttcagcccaggtccgaccttgggcctcgcagcctgcaggaagccctgctccctgggaaggttctctctggtcttcttcctggagcttggacttggacccaagactgggcgctggggagtggtgggacgggagcaggccatgttatccaaaagcttcctgtgtcctgggaactgcccaggacttcccagagaccttagacgcccatctggatgtggaggaatgttctccctctaccaggagctctatgtggtaggaagtcaggggaaggcttcctggaggcagaggcaaatcctggaccttgaagtcatcggatggggaagtgtgccgctggatagctggatactgcagggaggaagcgagagtgctttgatttgccgtggacacaggatgtcatcatgatggctattttgatatggcctccctcccagaaatggaacctgcagttactgcagacccgtgtccctcctctggactatggatggggaccctcctgcctcctcctgactccgcccatcctcttgtccacccgacaccaaaatcgtgactgtccctgctctgagtcctggagatgaccggccacggctcctgcctggcttgtggtctagtggaggatgaagaaacattcacccacgtgtaaagtccctgtgggttatgtgtgtgctgggccctggaggacaccagcaaaccacgcagaaggcagcgtggcaggagaacgagctttggtttttggcaatagacctcgtttcagatctcacctccaaaacagaatgtactgtgtgacaaattacttcatgtctcagagcctcggtttcttcctatataaaatgggatgagaatcataaataccagcacagatagtgaggacagcgtctgtaccatcttcaaagcctcacgcagttccttggaacttagcgggaagcggtaactagcggctctcagctcaggaggagctcatagctgtgcttctgtgtgcattccctatagaacccactcatcctggtaggcccagtgctaaaacgagtttggacaggggaagagtgggggcaactaacttattgagggtggtgggaggggagcaagcaggggagatattccagaacaggaggcatctgaactggccttgaagaagtggcaggagtgagcctggttgacggagttgtaccagaatagaagaggaagtgtgcagagtcagggggccatgagtagtttggggtggctagtggaggggtggtgtcctgagaagtgaggccggagggcggggctggcagggccacaccttcaccctgtgaagtgactgtgccacagagggatgggatcaaacctacacatcaggagggggaacagagtcctgacccagaaaggaatgggttgtggggctgtgagcctctggggctgggtcagggcacctcagaggtccctcttgctggctctgccatccacaggcctaggattggccccggcttctaccttcaaggcaaagccacagcctctgccttggttattaagtcattaactgggcctcacacagcctcttcattacgggtaattatggtcaacccactcagggcattaacaaggaggaagacagcttctctggctgtcaggctgctgggacatccgcccgtctgtcctgcattccgggaaattgctcaggattccaacctgggtctcggaagggacagtgacgttccagcctccccactccttccacacccccagtcccagctgccagcaggatcctcatacagcacctggagattccactttttcctacttccctgtggtgtgactttgagcccacagcctgacttcctatgctccagtttcctcatctgtcaacttggatcctagtaccagcctcctagggctgtgtggggattatacaggcatttaatgctcagttcggcaaaccatcatctgttgaatgctgccatcatcatcgtcatcatgaagagctctggagtcccccaaaggcttctgtccctgcctgtaaggcccccaaaggcagggccatctcctcttccttcttccgctgtcccttctcactgcagatgtgctatggtcagcggggctctggcctgtgccctgggtcctcctgtcctcacagataatgcaggcagggaccctgaggcccacggggatgggggttgtgcttactcaggagccctggctgagtgctgcgaggggtaggaggtccaagatcctgcctgtcccccagaagccatggctctgccagtctgctggggctgtgggtggtttctgggtggtccagctgctgcccccaccccgtgacgtgcaaagccctaaagtagttgggcttggaagcgggtgtggcctcaagaaatccacttctcccaagaaaacgggcctggagccccgcctgcttccctctgtaccctgggccagaatctgaaaatggaggggcccggttataatcctgagggcagctggggtgacagtgtgtgtgtgtgcgtgcgcgcgcacgggtatgtgtgtgcgcgcgtgggtgtgtatgcatgtgtgcaggtgtgtgcacacacgtgcgtgcgtgtgcaggtgtgtgtgtgcatgtacaggtgtgtgcgtgtgtgtgcgaatgtggttgtgcacatgtgcaggtgaaccagagtgagcggctgcccctcccaggccagagggctccccgcagctttcagggcccccgctgctctctgagtcatgggctttgtgttccccctgagggaaaggcctatgtctattgcactgatccacggcctgggccgcaggtagggaagaggcccaagctggcagataggaggtgtggttgcccatggggcagaatgaccgcagaggagccctgcctttccctgcccctcgggtccttgtgagtgatgggaacaggctgaggacaggaggtccccggggaggcaggagggaagcctgggaaacctgggcagggtagaggtcgcagcagagcaggagtgccgcagatatggccaggctgggccctgcaaggcgggaaagaggctgggctggtctgtggggacaccagccatcagactcggccagtgagcaccctctgtcttccctccaggcgtccttctggacatccagcagcactttggggtcaaggaccgaggcgccggcctgctgcagtcaggtgaggcccacctcccaccttcccccccacgcccaggcgttggcgtcgtgggtcctgtcctgttggtcgtcatctgccacccggtctgtcttcccctgtcctgactcctggaaagagagtgggctttgcatcccagtctcactattgccacctgccaatggcactgcttctctgagcctctgctgcttttcttgtgtaacaaaatgaataatacctgccctgaggggctatggcaggtaaaggagagtgcaggcagaggttgcagaggtgaactttctctgggtcctggggcctcatcgggacccagtgatccaggctccctcctgaggctggtgcagggagctccttaattcagtaagttgggcaatgccagcagagccgtggtgaccctgtttttatctcctgccctcccccacattccttccaatatcatcaaccctgggaatcgcctcttaggtgacgaagcaaaaaactccagctagtcagccccagagcggttcccaagcccggggcaggcgcctgagaatctgggccctggactggacgtgggcctgaggttccctaccaccctctcccctggggcccaggcttctgatgggctgccagagcagggcctgagcccccaggctgctggaagctgggccgggacagtgtgggaggccattaagcacttatggcagcccaccagcccctccctccagggagcgtgcctcccttgtccctgccttccccatgacatggccctgtgggagctgggcccttggctccctggccttcccactggctgaggccatgttggcgatgctcttagcagcaaccttcaggcctgggcagagactaaggccagtgctgccactcagggcttggggcgggaggcctggtcctgactctgccctagtcatgctgtgtggccccagcctggatcctgctttctctgggcccttggccctggagtccatctggctgtgagcccccgtcagatgcaggatgaggtccccatggtctgcattccagtccagtcggtgaaccccttcccctgcctgggccctcctgggagggagggggtggagtgagctcgttctgtccaggaacctgcctgacctgtctaagtggcattccagtactcacaatccctcccgagctcacagaatgccacagccactccccccacctcccttcctagctgtccttacagcccagatggggactttggggctcagagagaggggttgcgatggttctcaggctcaagtgagacttgactgttctaggatggggcagggccgtgcggtccagtatcccctataggtggccaggtccctgccctggcagacatcatgttttcccaggccatgagcccaacgcctcccctaccccttcctgggtctccctggctaggccagaataagtctgcctgccctgccgcctgagacaggttcctctagccctctgggctgtgtgcatgcagtgaccagcactgcagctgggaaatggagttccagccacatgggcgcatgggaaggagtgggctgccaggctggcaaggaaagggtgggagaaggcctagctgcccaacccccgccctgtgtggcccctgactcactggggacctggcccgagcctcatccccctcctggtcccggcctcactgcctcatctggagcaaggctctaccccacgcatcctccatttaatgaccactgagcatggtcggggccagcacagcccagggagggggcgggaggtacagggaatggtggggagggtcacaggccgggcagggggttgggggctcggctcaaggcaggtgtgagggttccctggttctttctgcggttctgtcccaggctggcttctcgggctcatgaaagagaagtcactccgtccctcctcatcccggtggcctggctggaggtggacaaagcacacacaggcattgtcttgtttcattcttccagtaaccctacgggctctgtttgtcagctgcacttaccagatacagggacaaaggcccaagacagggaaatggcttgcttgagggctggcagtggagagcagccggcctggaatagggacctgggcctctgcctctgctgcccataggctgggggggagcctggatacctggcatctcagtgtccccagggcgggtgcctctgggccatggtgagaattgccagcattctgagggaccctctagtctgtacaccatggccctcacctgtcacctaccccggcacagctaggatggctccccagggtgccctcacccctttggccacctaagccaagaagccagtcgagtagaccatgatgttactcagtggacaactaggcaagtcacataattggcctgtgtcccaggcacctgtgccttccccaagcccgataaggtcggagccaggtggagggcgccagccaggtgttggtgcttgcccagatcaaagggccagggctgagagctgggctgcctgcttatttgtggcaccaggggctgctgggccaggagacagggagtgggggtggctgagggttaggcctgggcttgcccctgctgtttccctcttgggaccaggcaggaaaactgctgaggatgagcccactttcagcagcccctttgcagattagatggctgctggtttggacctggcccctggaccccctgcaggagccatatctcaggctctctgaaagcccacagcagaattacagctcataggctgggcgcctatggcttacgcctataatcccagcactttgggaggctgaggcaggtggatcatctgaggtcaggagttcgagaccagcctgtccaacatagtgaaaccccatctctactaaaaatacaaaaattagccaggtgtggtggtggatgcctgtaatcccagctactcgggaggctgaggcaggagaatcgcttgaagccaggaggcggagattgcagtaagcccagattgcgccattgcactccagcctgggtgacagagtgagactctatctccccaaaaaaaaaaaaaaaaaaaaaaaaaaacaaaaaaaccgctcataggttttgctgttttgggaaatcaggagcccccatggcctacacctagagaagcagctgccactgaacctactgcctggcaggccgtgtgctgggctctgcccagactcagttcttaccctcaggtagattccctctatctatgggggcagaaaacgtatcatcaagccaccacccaggcacagggggctgtgggagcctgggtggacggcagagagcgtgcacctagctctggccggtggccgcggagaacacttccctgaggaggagacgtttgaatggggctttgaaggatgagttagagtttgtagtcagtgtgtgagatcgagtagatgtgtgaagccctcctttcccctccaagctagataaaatatgccaagaaaacatgttgaaattacaaagctgagcttgacagctaaagctagcagggaaattcccagatgccagaagcagagagctgaactcaaaaaccggagtgggagctagaattgaagccaagtgatgcagagtgtttagggaccagataaacgtcttcgaagcttgttacggtattttcaatataaacatttttatcatgaaaaattttaaacagacataaaaagtagtgagaatggcgcaacgaacttccatagaacacatcacccagattcatcaagggaacgcccgcctggctcagtttccgggcctggggtttcttcgttctaaccgtgggtgattttgtttccatccaagcttcctgattccaagctgtgtccccaggctgctgggtagtttttctggtagagttccctttcgagaatgggcatttcccacctggcgctggctagttccagcccctgctccgtacaggcctggggcttccacttccttccccatagaggccccctctgtttccagggaccctggcagaagcaaatcccaaaccattccttagggaattcttcatgacccagagcctgcatgggacacgggacaatttccactgaagacaaactcaaattcaaaattaatagagcaggccaggcgcggtggctcacacctgtaatcccagcactttgggaggctgaggcgggtggatcacccgaggtcagcagtttgagaccagcctgaaccaacatggtgaaccccatctctactaaaatacataaattagctgggcatggtgtgggcgcctgtaatctcagctactcaggaggctgaggcaggagaatcgcttgaacccaagaggtggaggttgcagtgagccaagatcacaccactgcactccagcctgggtaacaagaccaagactccgtctcaaaaaaaaaaattaatagagcatacagttctccctcatttttttgagagggagtcagctgaccctgaagatgggaaaacagattcgtcacaaagggactttaaaattaggtgtgtttaatattcaaagctctaaaggaaaggataggacttgtaagacaagaacagaacattatgaaaagagaaccggaaaatgtttaaaagactaatattcgaaaataccagaagtgaaaaatatgtattaaaataaaaaatggaataattaggtgagttaatgagtagactacacctagttgaaaagaaaagtgaattagaagctagatctgaggaaatcagcgtcaatgcaacacagggaagggtgagggagaacgaaggctgtttgtggcactgcctgactcgagtggcctgtggcccattggccatgggttggcgtatggggagaacagaaggagaagaggctggacagtgggcagggtctgagtgtgaaaggcttgaaggccaagataaggcatgtaggttttgtcttggggcagtagggagccagag[187 bp omitted]gtggcgggtgcctgtaatcccgctactcgggagac[144 bp omitted]ggatattcattctgggaccaagtgtgggaaggggcagcagaggaagctgaaggctactcagggccggggtttgtaggctcacgaggaagtgccaggatggggatgggggaacggagggagagtggggacagaggaagagccagctcaaaccgaaaccagacagtgcctctgttttgggggtaagtctccttctgcctgttctcccctcccgtctttggccagcccagcgactcctgcttcagcagacttgggttctgaaggcacagccgggcagcccctgcggctgttccccaaagccctccttttcaaggagtggccccaaaacctcattcaccctgaggcctgagagcccaacacaaggtttacatcctgagtaggggatcacagagcaggtgttcccgtccttccaccgggaagtctgagcgtggtgagctttcaggcgctgatggggccatctgtcctgagcattctccgtcagcttggccagcccaggccgtcccttggatggcagagcctggcccccgccccacccatgcctgcctgagcaccctccctgcccacaggatgtggaggatggtaggtcttctccaaataacagatcagccatgtaaaaatagccgtggctcagcccaggccgaagcaagggctgaatgcaggctccaaggccacagggcgggggctcagggctccctcaagctcagacttgccctttcctgctccaaaactgctttctggggtcatacaggccatgtgtgccatggggatggctccgctcaccatggacaggggtcctggggctgcccaccaggacaccgagggcccgtgggggttctgagctctgggctgccgtgagaggtggacagcactggctttctgacggcctcctgccagcctggcgaggaggagggagtgaggccctggcccaagaccccgaggcaggcgggctggtctgacccctccctccctgctgtcacggccctgcccgctcggccctggctccctgccctgcctctccattgtcctagacctgtgggctcagcacaccctccacaggatgtccctgcgggaactgctgggaaagccgcccctaccaaaaccaggggtggggctgccagtctgcccagaaagctctcctcaaacaaacaaagaccacgggattgcggggtggtgggcaggggaagcttctagcttggaggcccagcccaggctggtctttattctcagcagagttgcctgctggcctctgtgtccccatcggacacagtccacatgggcaaggcttcgcctatcctgtcccttctgccaggaacattctctcagccccctccccgtccctaccctgattgtgttcaggcccctccatggcctgtgacctccagggggccaggcggggtcctccctcctgtctgtcctgagcagagagagggcagcagtgatggatcccacctccctcctgaccctggactgccatgtcccaagggaagacactgaggggcaggctggtccagactgtgccttcctaatttggtctgtcatctcgggcaacttcctccacctcttggggcctcagtgacctcagctgttagatagggatggacgtggggaggatcaggtgagctaagggcacgtaggtgcttgggcaagttcatcaggctggggccggtgggtggggacggggcgtgccagcttctgccaggagtccacctgcagtcctggggacttctgcccatctaagtgaggagccagaaaccagggaggggttgaaagagctaagaagggcccgtgcttcctgctccactgtgggcaagaggagagaatggagcatgatggccggggtctggcgaaggtctgggtcacgtccctccagtccctcgtcacccccccgggagggggctttttcaaggatcctaccatggtgttggggggcggggtggagagagcgcgctgtggttctctgccgccttctaaacaccaaaccctgtcctggtctttagcccagtcctccctccacagcctcatctctcgctgcttcctcttgagcatcctcaggccatggcctgacctgtctccttgctgtcctcagcaggccctgaactttccctgaccttgggaacatcagctgggaccttcccccttcccagcatggcagtctggggagtgatttagagcaaggactctggagtctgccaaactgggatttaaattctggctcagccgcacactcgctgtgtgacatcacttcttttggcctccattgtctcctctgtaaaatgaagagaacagaatcaaaagagatcatctgtgcatatgtcaaggctgcatgctgggccttgcctatatatccataaataataactgcagttatcatgaacactaagcatcatgcctcgtgaaccattatacaatattgctgatctgaagtttatatttcagcgtatattcttgatgttaagtattatcttagcggtaaactcctatgcatgcttcagtgcccagctttgtcaccaccgcctccgggaagcctctcttcattatcctggcaggatctggagctccttggtggttccccaacataggttgtcctttaaacagagcaacctatgaacaagatctgcccctggccagacagggggaaacttctcttctgattccttctgtccacttgccacctagcacagacaggcacagggagaacaattcctcctcctcccccaacatgtgtcagtcctgatgcaactggaaatctccctcctgccacattctgatctgatctcaggcaggtccttggaggcaggcccagcaggaaaaattctttttctaaatgtgaggaaataatttctgccttgactaatttaaacaagggcccagtgttgaccaaggccggcctgctctgggcagggtgtggcattaagcaccttgcacgtgctatccagcacccagacccaccctggagagctgctatttttatcttcattttacagatgaggatgctggcatgttggcgctggctcaggccagctcatgagagtcaattgttaacatttcaggaatggtgtgtgagctagtcgtaaaatacaaccattgttaaaaactaaatgatatcggcttacaattaaataattagaaacaaggtaataactactcaaaagtcctcacttcctaattattttgctgtgtttcagcgttatctgtggtcctatggtgagtggcgtctgttctatttgtgtggtagaaacactggacaatggcgtgtccccgcacatccctttccaacgcccatcagtgacacgacgtgggtagcttgaactcagccagggcgga[132 bp omitted]aaaaccttgtctctactaaacattcaaaaattagccgggcgtggtggcagatgcctataatcccagctacttgggaggccgaggca[132 bp omitted]cccctcaccctttatcagagccagttaaacatatatcagcacaccactgaaggtgagacacagaatggctgtggcctgactgaggtcaccggctgggaaggagcggaggtgaatttgagcccagggagtgtgcctcatgcccggatttgtgcacccgcatgctgattctccccaaggcctctggaattaacaggtctgctcgtacacccaccacccacgcgcactcactggcctgttcttgctggcataaaagaggggcagtcactcctccagccaggttcaggggagctctgcctggccctctcgcctctctttcacctctctcttttcctccttcctccctccctctttctcttctctcaggtcccatctcgccagggtctcaggcccacggaggagcagccgggaccacgcacacattcagcctggcggtcagaggccaactggctgccatgtctgtcactcccagcctttgtctggccatctgcccatcagctgtgggactgctttccagggggagggatggggggccacctcgctgtgtgacctagggtccaccctaccttgctctgggcctcttcatcccacctgggacctccaaggcccctcccatcactggcagtggcctccctgtggaatcttctaaacctcttgttctggaagaacaaagccaggtcacggcctttgttcgacatcccctcatgttttcctttctcacccatggacgtcacagtcatcacagtgggctccggggccccaccccagcctctttcctgctcctccaacatgctaagtaaactcctgccccagggcctaggcacttgctgttcttgccccaataattgcgtgatttgtttccttacctcctccaggtcctggctgaaatacccactttgaccgctcaatttaaaattgtggtggccgggtgcagtggctcacgcctgtaatcccacactttgggaggccgcggcaggtagatcacttgaggtcaggagtttgagaccaggctggccaacatagagaaaccccgtctctactaacaatacaaaaattagctgggcgtggtggcaggcgcctgtaatcccagctactcaagaggctaaggcaggagaattgcttgaacctgggaggcggaggttgcagtgagcggaaatcgcaccactgcactccagctgcctgagcaacggagcaagacactgtctcacaaacaaataaaacaccagctaactatatcaataaatttctctcagccaggcacggtggctcacgcctgtagtcccagcactttgggaggccga[133 bp omitted]gaggcagaggttgcagtgagcggagattgcaccattgcactctagcatgggtgatagagtgagactgttgtctcaaaaaatataaaatcgtggcatccacttgctctcacacacacccttccaagctcctgtttcagcccctcccaccctctgtagcacttgccaccatctgacaagctgtgttattgatttgtttatttctttattgtctatttctcctcattcgaatgaaagcttcataggataggggtttttgtctcttttgttgattgatatatcccaaacacctaaaacggttcctggtgcattgtaggtacaaaaaaattgttgttgttgaatgacaagacggtagaatggacagatggatgacagtgttttcagccattaggaaaggccctgcggcgcgctgggagtgagggcagctgtgtggtctagcaggtgcgaaatctggagttccaggcccagttctgcctgatttgctgtgtgaccttgcgtagatctcttcccctctctgagcttctttcacaagtagaacaaggggtgcagtgtggtaaagtataaggaacacaggctctggagtcaggcagctggtgtcagatccccactggaacatttactgcctgtggggtcttggccaagtcactctccctctgagtctgtctccgcatctgtgaggtgggagggggctggaaagatacgtaatacatgagatacaaagatacatgatgagatatggctgggcgcggtggctcacacgtgtaatcccagcactttgggaggccaaagtgggtggatcacttgaggccaggagttcaagactagcctggccaacatggcaaaaccccatctctactaaaatacaagaattagccaagtgtggtggcgcatgcctgtaatgccagctactcaggaggctgaggcataagaattgcttgaacccaggagatggaggttgcagtgagccgagagtgtgccacggcactccagcctgggtgacagagcgagaccctgtctcaaaacaataaaaataaaattttaaaaagatatgtgagatatgacatggtgagcccctagcatagtgtgtggcatgtagaaagtgttcaataaatagatcttgactcttttaaaaagtacccaaagggctcacccaaacctggacaaactgggcgaactggacatacatgggagaggatggcgtcatggacctgcctgacctcgtaaggcctttcccaccttcctggggtgcaggtcgggccgaggtttcctctctgggctgcttccttggtccctttgctccacagactcttggccccaagccggagtgaaatgggccgggaggccggggcgcagggacctgggccccccctcaagctctcctctccctgcagtgttcatctgtagcttcatggtggctgcccccatcttcggctacctgggcgaccgcttcaacaggaaggtgattctcagctgcggcattttcttctggtcggccgtcaccttctccagctccttcattccccagcaggtgaggcccggctcggcttctccccgacccctgtgtcctggtccctccagcgagtggctagtcttattggcctgttgaagaatccagcccagggcttccagctcctttgcttgaaccccactgtcttcccagtgcagaaggacaggtggtcttcgggtatttttataaaccagccctgcggctggggccttccccacgctggcctgacctgagagccttccagcccatgtggcctcctgactctttctgagcatccctctgatttgggatggatgcaaagaacaagtctggcctaggagtgagggccttgagtcctagccctggctctgccattatctggctgtgtgaccctgggggagtcactacccctctctggttcttgctcagtttgtgcttggtctgatgaccagctgacttcttagatcgacatcccagagaagcaaatatcaattcaacacaaacaagagtcttctcatttagctcccacaggcctgggcttgaatatcccaactttgtttcctactcagctttgtgacctggaggaacttaatgtctctgagcctcagtttcctcatctttaaaatggggataatacttcccaactcgaaggtttcccttgagaagtagctgagctgtgaaggtccagaccctggaacacggcgagtgctcagccagtcattgtttctgttcctccttccaaagatgagactgttgccttgtgaggtagtgagttccccatctcgaggcgtattcaagcagagagtggcaatcacatgccggctgctatagagaaagatgaaggaagaaggggagagcatgatctgtcttcaaggagctttcaggatagccctgtccttgggagcacccaggcttcggggtaggaagatttgacaggaactcctgtgttcagagccttcaagaggtgtagaaaaagtgctgagagtcctcactaaagagacaacagtctcttgaaatccgtggggtcagggagggcttcctggaggaggtggcgtttgcgctgggcaggcaggactgtgagatcaggccttttggtgaaggtagcatgggcagagggagccaacccactgatgcagaaatggtggagtgtgttgaaagattgaggattgggccaggtgtgatggttcatgcctgtaatcccagcactttggaaggccaaggcgggtggatcccctgaggtcaggagttcgagaccagcctggccaacatggagaaaccccatctctactaaaaatacaaaaattagccaggcatggtggtgcatgcctataatcccagctacttgggaggctgaggcaggagaatcgcttgaacctcgaaggcagaggttgcagtgagcagagatcgcaccactgcactccagcctgggtgacaagagcaaaactccatctcaaaaaaaaaaaaagaaaaagaaagaaagattgaggattgcattttcactggaaagaaagcagggactgggtcatggagaaccttgaatgccaggctagagggcctgggcttccttctgtggcagtgctgagctctggaaaagtttgaagaacaatggcggggtcagatttgggttgatggtggggacattggagggagggcagagagaatcagcaggtttgccaaggacatccttgcttcatggggcagcttcgcagaggagggtcaggtcaggtaaagctccaggcccaggatggcaagcagagcctggtggccacagtcaaaaataaggactggaccagaggcctctagggcccctcaggaccttgtcttgcccctggccaggcccctggtcaccaacctctgaggctgctcctgggactgaccagtaagtctaggaccaccatgccaggtccgggtccatctctgggtgtgtggaaggagacagaagataagcaaaggcagagagagaaacaggtcacctccagtgaatccataaatgcactgaaatcacaatttgcatcccataggggtttctggtagactttggcaatgtgattctgaagttaatttggcagagaaaatgcccaggaacagccaagaacattgtgaaaaaataacagtgaaaggggatttgcctctcagttatcaaaatacagtgattgtaactaaaacagcagagggatggactaagatcaatgagccagagtcctcatttctgtggggatttagtgtaggatgaaagttgcatctcaaatgagtggtttgggaagaactatctatccatctggattgaaagaaaagtttggcctgtgtttcaaaccatcttgcagaataaagtcccgataggggaaagtaaagcaaaaagcaagctcttaaaatctagaactataaatcaacaagaaaaagacaaataactcagtagaaaaatgggcacgggatagctacagacagtttcaggagaagacacccaaacggccaatacgtgtaggaagagacagggctcagcttctctagtaaccagggaaatgcaaattagaacaacaatgagatcccatttcacacccgtcagattggcaacaattaaaaaggctgacaataccaagtgtgatcaaagctgtggggaatcggggactccagccctgctggtgggagtgtaaattggtagaggctctttggagagcgaaacggcaggatattgtaaaactctgtttatctcccgtggcccagccttctacttggggtatacacccaagagagaaactccagcttgtagacacatgcatgtaagaagcactggaatagccaaaaaaaaaaaaaaaggaagcaatctaaatgaccatcactgggtgtgcacagattaatggtgtgtatgtatgactcttttcttttttttttagacggagtttcgctcttgctgcccaggctggagtgcaatggcacaatctgggttcactgcaacctccgcctcccgggttcaagcgattctcctgcctcagcctcccaagtagctgggattacaggcacgcgccaccacacccagctaatttttgtatttttaatagagatggggtttcaccatgttgacaaggctagtctggaactcctgacctcaggtgatcctaccgcctcagcctcctaaagtgctggaattataggtgtgagccactgtgccgggccctgtgagactcaacaggaaaagaatgaactagatcttaattaaccagcataaatgggtttcaaaaagataagaatgagggagcaaaagcaagttacaggataagatgcgtggagggtttcctttcatgtccattttatttttaaatattgtttattttgagacagagtttcgctctttcacccaggctggagtgcagtggcacaatctcggctcactgcaacctctgccaccccctcctccaccaccaggttcaagcgattctcctgcctcagcctcccgcgtagctgcgattataggcgactgccaccatgcccagctaatttttgtatttttagtagagaagggttttcaccgtgttggccaggctggtctcgaactcctgacctcaggtgatccacttgccttgacttcccaaagtgctgggattacagatgtgagcccaccatgcccagccttaaatgtgtttttgagacagggtctcgctctgtcacctaggctgatatgcagtggtgtgatcacagctcactgcaggcttgacttcctgggctcaactgatcctcctgtctcagtctcctaagtagctaggatgcatcatgatcccgctaatttttatcttttcttttttttttttgaaatggagtcttgctctgtcacccaggctggagtgcagtggcgcaatcttggctcactgcaacctccacctcccgagttcaagcaactctctgcctcagcctctccagtagctgggatcacaggcacccgccaacacacccggctaatttttgtatttttagtagagatggggcttcacca[136 bp omitted]tctcactatgttacccaggctggtctcgaactcctggcctcaagcaatcctcctgcctcagcctcctaaagtgctgggattataggcacgagcccccatgcccagcctcatgtttgttctttaaaagcacacagggggccggatgtggtggcccacgcctgtaatcccagcactttgggaggctgaggcaggcagatcaagagcagcctggccaacatggcaaaaccccgtctctacaaaaattcaaaaattagctgggtgtggtgtcgggtgcctataatcccacctcctcaggaggctgaggcaggagaatcgcttgaacccggggggcagaggttgcagtgagtgagatcgcgccactgcactccagcctgagtgacagaggaagactccatctgaaaaaagaagaaaaaaaaagaaatcaatgcaaaagagacaaatgacccaccagaaaaacaggccaaggctgtaggcaggtgattcccaggaagagaaacagaggcgaggagctaagggcaaatggggagatggaaaaagagagacaagcatgaaggggtcagagatgggccaacccaggcagcacctgcaggcacagcaagccaggagcgaggtgagcagatggagggaagtcagggagacccgggggagggctggacgcgggcgatgctggccagatgggtggccagggtggggctggggaaagatgaccaggctgggttctcaggccccgggcagctgggggacggagggagcaggtccacatcaaaggggtcatgctaccagcagctggcagggccccacccttccccactcagctgggctttgccctttggtgtgtgcagggggaggggctctgggtcccctgggcttccctgccaacgccccactccccactccccacttcacactgggccctcagtgctgccagggttggcctagccacccggcttgggagagacacacagagtggagggtggtggcttgaggctcccgaagtgaagtcagaaccagggaggggtctcccagttggtggagtagtggagacataggcttgtgtccccagtgcctatgaggacagagggggcctacctgggccataccactctcaagctgggatagtcccgtcccataccagcactgggccggccaggccccgtcagacccactatacagaggggcaaactgaggcccggagtggctgggggaggtggtctttacggaggtgcagcccaccagcaccctcacccttctctcccctggctcctgggccctgcagggggagggagcaaagtgggaacaagggatgacaggcagacggtgggtagtcggtcccccagcatcctccacccctcctcacagtacttctggctgctggtcctgtcccgggggctggtgggcatcggggaggccagctactccaccatcgcccccactatcattggcgacctcttcaccaagaacacgcgtacgctcatgctgtccgtcttctacttcgccatcccactgggcaggtgagagccggagatgccagggtctgggtgaggatctgggcaaggttcccttggacttctgagttctcccactccctggggttctagcccaggcaggcgtcctcagagagctaaacatgtgggcggtcagcctttgagaatctcctggacctgctccctggccagctggctgggtggggagggtgggcagcctgccttgcagaccagcgggcactccctgtccccagcccctgtctctgctcagcctgacgtgtgtctcttctctgcagtggcctgggctacattactggctccagcgtgaagcaggcagccggagactggcactgggcattgcgggtaagccctacgtcccttcccatgaggacaccctccggtccagacctcgccccagggttgcccagagatgtaatccaggctaggacctaggcctccaggattcctcccctggctgcgtggactctgaaatccctgcccttccagattagtccagattgaggtatcagagcgctcagatgtcccgattgaggtgtcagagccagacacagccccgccgccctcggggcccccaggctgagggttggaatctcccacccgggagtcccaggttgagagaaccaaggattctcccaccacgtcaggaaattccaggtccatggcggtgcttcctgcctccagccctggcgctgtgctagggtaaggctgggacaagacctctgtgtgggggccccagagtctggagccacttccggtctcgctgggtttggggcaagttaccaaggccccaggacagcgcaatcggaggaaacagagatccctcgtctctcggaggagcggaagcttaagacaaagtgttttttcctaaaagcaggaaggaagcggcctccgtggaatttcttagtggggtggggggatggggaggcgagagggaggtggcaggcagaggaactccccaacccaggggctcccagtcccgggggcatgggggagagtgttctgcggggctggtgagatggaatccaggctgccagggtgttaccctcccacccggagagaagcctggggccttggaggttctgttctggaaaatgggctggaaacggggaagatccaaaagggctcgggagcctctgtggggcctgcatcgggcccccaccaaatgccagcccacttgatctgtcagtccagcgcttcatacccaaacagcaccttcccagggccctgcggctgaggaacctacgtggggaacctgctccaggaattttctcctccctcaaagtcatcatcccatctggctatctacttattttccatccgtctgtccatccatccaccatccgtccgtctatctatccgttcatccatctgtccatccgtctgtccatctgtccatctatccgtccatccctccatctatctctgtccatctctccatcaacctctttagccatctcttctctatctatccacccactgctccactcacccacccctccttcttccttcagtctgtctggcttccctgcaccttcccacctctggtcctgcccctggtctggacaggccatctcaagcctccagtctcttgaccgacctcagccccagcttttctcagcagcccaattaggaaggctgggcagatacctgctcagaggagaagcctatggcccagagaaggcatgggcttgcctgagtccctccttctgcagcagggacgaggctcactgggccctggtgtcctaacttcctgctctctggcaggtgtcccctgtcctgggcatgatcacaggaacactcatcctcattctggtcccagccactaaaaggggtcatgccgaccagctcggggaccagctcaaggcccggacctcatggctccgagatatgaaggccctgattcgaaagtgagtaccgcgggaaggggtctggtgggaagagagaggggtgctgagatgagagggcctgtccctgcagggcagcccactagcaccctcagccagacaccccacctctgctgtctcagtgctgggagggacattttggccccagaatcgattattcctgcagcctgaaccctcacccctggagcctgtaagacgaggcatttgggggcctcctgttcccccagtgcatggggctgcctaggggggtgaaggaggtccctgagctcagtgtcactgcctggcctctccccagccgcagctacgtcttctcctccctggccacgtcggctgtctccttcgccacgggggccctgggcatgtggatcccgctctacctgcaccgcgcccaagttgtgcagaagacagcagagacgtgcaacagcccgccctgtggggccaaggacaggtggggccccgcggggtgggcccagggctggtgagggacctcggacaggagagcccctcagccttagccctgagccgcctcaactcgtgcgccaccatcctctgtccccacagcctcatctttggggccatcacctgctttacgggatttctgggcgtggtcacgggggcaggagccacgcgctggtgccgcctgaagacccagcgggccgacccactggtgtgtgccgtgggcatgctgggctctgccatcttcatctgcctgatcttcgtggctgccaagagcagcatcgtaggagcctatgtgagtgcagcgggggtcaagggtgctgggggagctgggcctgggccgcgggagggtctggaacaggacattcggtctgacttactggatgttcccttccctcggggaggctcctattctctggctgcccctgctcatccccagcctggccacacacagcctgtccagggcctctgggtgcctcagggccgtgggcatggcttgaagtctctggatagcccatgaatggatgtgggcccgggaggggtgtgaggttttgtgggctccctgccagcagccagtgtgtagggaacagagactgtggttgctgcggatggagggaccgctgatggtggctttgccttctccccggcagatctgtatcttcgtcggggagacgctgctgttttctaactgggccatcactgcagacatcctcatggtgagccaggcaggccgaggtcaccttgtgctgctgacccaggcctcttgacctcacaggggtgcctggggagggcgggtgaaggggcgggagagctggtaggaaggcaggcctgccaggaacgtgaacccagaggcagggaggggatcagagagtttggggtctgcctctggccagggctggaaaacagggttgggcaggcagacagagcaccatgtggagactgagggggagggggcatctcgaggctcaggttagtggctgggaggctggcggtgccaggctggcactgaggtggcgctgcctgcccgccctcctccccccgctgggtctgagcatccataggctctgccctctctactcagcctggctcccaggcgtgcctgcggctggggctgggcggacagaggctgtcttcacagggccaacaatgggctctagcccagccagctggggacaaagggctgtcttgagcggccagcaggggcttgtgtccctgggtggggatgggagcaccctgggaggagccaggagtggagctaggagttcatggccctctgggcgtggcaggggtgagtgtgacacttggtcctgtgcccaagggtcagcctggccagggtcaggaggggacaggagagagtgtctgggaggtgtcagggcaggctctggggcagagaggaaggactcgggtggattctcagggtgcccgggtttgggtgccccagcatgggacagcccgggagatgagtgtgccaggcactgcggcccctgcacttcgggaagcctgccttaccccaccctgagcctccgggcgtatccgcttccccctggggtggctctgtgtcctcccgagtccatgggctgcggtggtggtggggaggcctggcgcagttcagagcctcagcacggagccaggcggtggcaggggtgcgccagggtcactgcacaggcccagagtgaagggaggagtccgtgcagattaagtgctcttggtgctgggcaggaccccctctcctgcctccacccccagggagcgcctgacagctgccggcagggtcagggtcccggggaaatcgcgtcccggtttattaagtgtaacagtttattcctgctggaaacagggccactcgtttcatcagattcaggcccttttccacccgccccccacctctcccgcaacggggtgccccgtgggtgctggttgcttgcacacaatgcccactaaggctggcactccaaagaggcgaggcagctggagctcggggaacaggggctgcctgggcacccacagagctggctgtgcctgtcccgcccccaccccagcccctcctgtctgactctggcctgcccagctttgaagccaacctcctgtaggttggggcctgcttggtctgatgggggtctggggcccagcagtgccggcatttggtgctgagggtgcccgcgggtgcgagcggaggctcttgcaggcaggggcctgcctcaccagctcctgtcccaggccagtcgaggcctggcttggtcctcagggaggggaaccaagatgggtctttagcttgatgggaggtgaggacaaatggctgtggcgggggttcaggttccctcgggaacatgtgcctctctagacctcagtgtccccgtgacccaggtccaagggcagaagccaaggcaccctggtctcaggaatggagcaggagccgcgctggagaggcagcagcatggccgttcctgatggctcgggtactccgaggctcggagggctctgggctaatggcctctagtgactggcgcctgggcaacccccaaagtatcattccttaactgcatgtagctgggagggaggtgaagattccaatttcagaggggtgtgctgggggcacagcaggtttgaggccaatgacgctttcagtatggggcaggtcgcagtggtctgggttggaggtgtggaagcccctggggtgagggtgactgcagctgtgtgtgggtgggaggggctcagggaggagaagggtgactggcaggagagaagcagccaggctggtggggtgggcagtagaggggactgtggggaggagggcagggcccaggggagagaggtgtcaagacgtagggcaggagtgagtctgagggtgtgggggcttcagaagtgccacggcccggggccagggccaagcgcgtgagcctttctcctctggccgctgacctgcccgcctgttccgcagtacgtggtcatccccacgcggcgcgccactgccgtggccttgcagagcttcacctcccacctgctgggggacgccgggagcccctacctcattggctttgtgagtagccccggggtggggctggccagggcaggctgggggactgcaggagggctctgccctgacatccacccccaaatcctcgcagatctcagacctgatccgccagagcactaaggactccccgctctgggagttcctgagcctgggctacgcgctcatgctctgccctttcgtcgtggtcctgggcggcatgttcttcctcgccactgcgctcttcttcgtcagcgaccgcgccagggctgagcagcagtgagtgggggggaggggaggccctgctgcaccgccgggaagcagggaccgtgatagccaccgtgagccctgccctggggtggggcggggagggtacagacctcccatgcactcagtgcacccactggttgctggggtccagccctgaggcccagtgccagggtcagcctggagctgtgggaggccacgggggtgtctggtggatccagacttgggtttgtctctggacttagtggttttcaaagctggggcccctccccttcctcttactttctgacttctttctcctttcctctttactcctctctctctcctctccccacccctgggctctcccatctccccctggggctgacgaggtccctgcccagcacctccggtcagctggcccccacgacacgatgtgccagagcagtgcccgggcccggcccccgctgatgcaccaccctgacccccgcccgtctctcccccagggtgaaccagctggcgatgccgcccgcatctgtgaaagtctgaggtggtgagtgcaggccgggaggcacgtgggggctccctaaggaaaggggaaggccagggttaggcaacagggagcacttttcctccagagtcacctcctaccccagcacatcccaccaactctgggctttgtctctgaagatgttgccagaatttactgatggagccatgggtgggacagcaggctgctccttccagtaaattagctcccctttccttcctttcaagggctgggtggggcctcgcatagatcagggccaggactggccaggaactcctcactctgtccggacttctgttctcccaaatcctcctggatgtaccagggcctgactccttggcccttccctctgggagttatagcttcccagcagcacgagacccagggtcacagctgcaggtccaggagaaggcttgcgtctccaaacagcaagaaaagggaaggagggagggcagccttggcacaggccccactaagccccactgctgacctgacacccctttccccaggtgccattgggacaatgaagaacccacactcccacctcgtctgggaggtgtcctacagcgtccgggaccggctgggctgccccaaagctttctgtgtgatccacggctaggcacccaccctctctggcccaggcctgctgagtggccctggcatcaagaagaggctgtgtcctcagttaccctggaaggatgtgtgtgttggagccacacggttggacaggttcccagccctaggtttgggccgcagggcccctggggccaaggaagaagacagccccaagtgggtgtccggggagagcctggcctgccaccagcttatgtgatcttgggcaagtccctgccctccctggaacgaagggccagggggctggactttcccacacaacttgctgggcaaagcacgatctgcagctttgaagactcaacagaccctggaccatacggagagcaggtggcccaggcctcagggcggcagtcccggctttgaggctcacgcgagggcctggtatgcagggaccactgctcagctgggcctcggaccttggggatattggacgcaacctggcaaatgaagctgggcgcccaagtctctgggtactccctggaggacactgtctcactgtctcgggttggctcccagcctggaggtcccagatggggactgttctgacaagctggcatcaccaggggtgaaggccctggctgcagctgtacaccacctgtgcccccaggctcaaggtctctggcaggtgcacaccagcccaactctgcagggcttctctccctgccaccaccccccaagccaggaccccactccttccccgaggctgagctgagccttttccaggggcagggcccaggagaccattcccagaatccatggggcagtagccagggctccggctgctggaggaagcagctatccacaaagcttcctgccccagagctgaggctgaggccccgggagaggcggcccctacccaaacactggctgctggcattccaccaagtgaccccaggggggggccaggccttcgatcacccacctcccatccatgcacacaccaggatgcagctgccaacttcacaccagccccaacccgctttgggggagcttagccccctgcgtcacccactccctgcacttctgctgcaatcaaggtggttctggtgcgggggtggggtggggggtgaggccttgtggccaatgggggaccccccaagagccagcttggacaatgctcttcttgccccttagttactggctggctgtggcttcagtggtgtgtaagcaggtggaatactcacccaccaagctctggggtaccccgagggcctgacaagaggatggggtgggggtggcatcctccaaagaccagcctccacccccactccagcctcagcggggccccagcgatgttttcttgttgtacaagaaccaggtccgagtgttgcctcctcttccttccggaagccaaactgctcctttattttttagagctgctgattgtgaatctcagagtcttaagagagaagccaaatatattcctcttgtaaatgaagaaataaacctatttaaatcaccccctggtggctccctcacagcaaaaaagcctgggggcaaagaggtggcaggcacgagagatggtcacacctgcctgcagccagcacatcaacctgcaccaacccaggcaaacaccagagccctggacatggccctggagccagggtcccagcccagaaccgggggtggggaggtctctgcaccctgggacccctgcaggaatggctcaggctgtgcttgccagagcaggatgcccgggcaggcggcaacagccaccctccccagtggcagcgccttagaaacagcttgcgtattaaaatcatggtttaaaaaaaaaaaaaaaaaataggcgtctcaggcagatggaggcaggggctgaggggggcccgtacctgtgctcagggcttccctgccttcctcacctgtgctttcttcttggccccactctgaagcaggctgggactcctgatgaccaaagacagccttgcctttttccgtgccagcgcggacagtggtgatttgcccaagaccccctttttgggaagagccttctgatgctgcttttggcctgcaggttccgtgggggacccgggagctccattcacctgggacggcttctggtttttcttctgcagttttggggatttggcaggggtgctggggctccgggtgggggcgccaggggctggactcttggtggttggcgtcccgtttgcctgggctgggaccttagcctttgtcctgttcctcttcttcctgcccatgctggggggctggctcccgccggtggctgcaggtgtgccatcctccgctggcgtgccatcctctgacttgcgtttcttgcgcttcttcgtctctggcaagaatccctttttcttccgcttcttactgatggggctctgggtggcactggggatctccttggcatccttcttctccaacttggggcgcctgaagggaagtgagcaaggttagaaggtgcccatcgagggcagcagccaccgccaccgcgactgctacctccacctggattctgagggtcctctgaggcccctaggttctgtgaggcccctatgagggtcccgtgagggtcctatgagggtcctgcgaggcccctgggtcctgcgagggtcctgcgaggctcctgcgagggtcctgtgagggtcctacagctcccacatctgagaatgcgcttgagtgcatgtgtgtgcagcagcatgcgtgtgcagtgtgcgtgtgcagcagcgtgtgtgcagcgtgtgtgtgtgtgcagcagcgtgagggtgttcccagcccctacccaaggtgtgtgtccccctcccagaacctactggactcccagggttttcatggcctgccagtagaggtcgtgcaggcggctggagccggtggagtgtgccccctgctgtaggctctgctgttgcccctgcagcacacccaggagcaccgtcaggtccaaggtcagcttctgcagagggtgggaaggcagagctgtggggccacagagggcggggcctctcgcgggctcccagtcttcccacctctgccctgttgctgcctcaccagtgacccctgccccttcctgggcctcagcctctccttctgcctgttaagtcatccgtgtctcttaccgagggaggaaacacgcgccccaggtgttggttctcctccttcccatagccaaaggcctggtctcagagtctcggtgtcctcccctccagcagtggcccgggcccacccacctccaagagggccactccccagcactccatcaccgcggggctgccaaagcgcttccccacccaaccctgccaccttcctgcacatcctgaatgggttattgttggaatccgccagcttccgggagccctgctctcctggcttcctcactatcagccagttttgtaaggccccgtcccgggccccgcctctgcctgccagcacccccttggcaagctctccctccacaagggctgactagcacctatgctgaagattcccaaaccccgccctctgggccagaccgggggacccagatggccacctccagctgcctcccagccctgccctgatggctgcccacactcctgtaccaggcctggaaacctggctgctcaccctgaatcttctccaacccttccacagtctccagccctgccagccccttctcggctttctcacgggatgtggcagtgccaccccaccccctctcaccccgccctgcaggaggaggacagggtggcacagtcccttcccaagtcactcacccatccatggtttggtaactgcccaaatggcagcccagagccctggcccaggcactgagaagtttccccacatgacccccatccctgcagtccagcccgggcatggcactgctggccgggaggccccaaggcccccaagaggaacccgaacacgaccgcggactgggcccccgcctcacctcatgtttgcaggtcctgaagagaacgttgagcagctccagggaggacagtgcctgctgatgctgcgccttggtctgcgcctcccccagcacgcgcaagttctagggaagggtggccaggctgaggcactccggagagctgctcaaagcctttctgtttcccagccggaagtaaagcccagaggcagggaccgtctcctgggacaaccccagttctcccgactctggactcaggctccaatcctcacttctttcccagagatcggtctcccggagaactgattctgagggggtggggaaagggcgccccccggctgttacctcggtgacctttgctaggacctggcccatcagctgcttccactcggggtcctcaaagcacgacctcacctcccgcatggacagggtcttctggagcagcaggcaggcctgtgggtgggcaaaggtgggtggcaggagccttggcacgttgggtgctcacggctcagggatgcatgagggctcgggggcccgctgggcactgctgtgggcagcgtgtgaggctgcctgctgctctgggctctgtgactacctgctcctgtgcctttgtgtgcaggtggggacaccaaggcctcccagctggatagaggtgggacctcaggttgggacaattcctgcccattattggcttagtgccatcttcctccagcctgcccccaacagccctggcaccagagcagacactaccaggggcatcctgtgtgtggccagatgggcagcagtggctgcgggagtgaggctggccctgccccctcagctcctgtgtgttcactgtgtggcaggggccagggcacggccacccccttcagagaccatgtacccacagccaagccagtggggcagggacagctgtgcccgtgctcaccaggacagcgctctggggcctcacaatatccagtcagaagagggttaagcgggttaattcagacaggccctgggctgggagctgggaagtctctcacctgatgacggggccgcaccgggcccgtgatatgctggaccaggatggggagcaggctctgacagagcacctggtggggagtgacaagggctgtgaggtgcaggctgggctgagcagggaccatgaggaagcagggcaggccccaacactcaccgggtgccgggagaagaggctgaggaacatgggaactgtgagggggctgttgcgcttggtcaggaaggagctcagtgctgtcgagtacacccgggtcaccaggttcaagtccaagcagctggcagcctaggccaggggagagcgagctgggtgaggccaggagaggggtccctgggatgggagcagagcctggcctaccttcatcagaaggctgagggttgggccctggggaagtcccggcctccactccctggctgtgaaatgcctggggctgctcctgggccaggccctgctcacctgcgggcccgtgggcatgtggctggggtcagtgccagctttctgcttctcctgtgtctcatgcacgcagccctcagcagtgttgcccttcaagacccggagcaggtagagagaggcgttgaagtggtagagggcggtgggggagtcgggctggcggccagcctgctgcaccaaccgctccacctgggcgtgcagggcccctgcgcgctcacccaagtcgtggcagtagcgccgggcacggcacaggtggtgcctgtgggtggtgaggacgagagctggtcagaacattctcggtccaccctgctccgccaagcagagccaacccaagtcccactttataagtggggaaacagacctagaagacgacagaggcgacccaggccacagaggagggcccagggccgcctgcaggctgcctggaagctgtgtgggctcagagtgctggggtgacaggggcgctccaggggagaacagaacagctccctgagtggaggctgcaccaagggccaactgcctgcctggggcacccctcctgtctacacttgtctctcatggggcagtggccttcaggccttttgtaaagcgagacaagggttcatgtgcttagaaccctctgtggccctgcagggccggggatataatgggggcaagaggcaggatgctcaacaaacgacactgtccacgcacgctggcagaactatctgagaaggcgtggcccgggcgggcctgggtttgtgaagaatgcactgccagtcacactccccacccctcctgactatccacgcagcgccccagctcccaggccttcacctccccagcacctgagctctgaaggcaggtctaccaggtgcctgcctgtctctcccacgcctgccaccgcctccctcctgggccctctgcctccagcacagcccctcccaaacccttctccacgctgccagccgtttctgaaaaggcaaaccagactcagacccttccccacgccactgctcttgctgataatgcctctgtggcctccagcaccgctagggtcagggcctgcgagggtgcgggggtctgtggcctcgctgcttgcctgaccttccagctgcgtgtctgaccagctcccgtcaggatgctcttcctccctttctgccctgcccaaggcctcccagcctgacaaactcccatgcacactacacctccgaggactgggttgggtgtcccctgccacaggtgcacccactgtccccctccaccccagcacagccccacttgagactgtcaagggcagggatggaccccagctccagggcactgttggcacagccccacttgagactgtcaagggcagggatggaccccagctccagggcactgttggcactgtgtcgggagaacgcggggatgaagcaaggactgtgggaatcactaagtgacgtgtgcctctagggctgagcagtgagcctgcgagctaggggcccaggctggaagcttggctctctccttcctgtgcagacagcaagcctagagctctggctctcctgcgcctgggggctgccggccacacctgcccgccctgcacccccgtgctcacgtgaagatgcgcgccgtcttgtgcagaaggtcctgctcctgtttggagctgctgctgcgcaggctgcgccggatgatgctcagcagcggctccagcagctccaggaccagggcattctcgggctgcttggtcactagcacctccaccaggtccagcacctgcagccaggagggcaggtcagcaacacgggggtgggcgcacagggaggcgggggtgggcgcacagggaggcgggggtgggtgcggcccgcccccaggctcacccggatctggaagtcgcgccgcagagccttctccttctgcagcttgttcttctcgtctcgccgggcctggatacgcagcttctgctcggcaaagaggctggcgaggctctggtccagggccatcatggcctcatcccccagctcctcctcgttctcactgtcctctccaccctgagggacagaggcccagcggtcagccaggcctcgggcaggcacacaacatggggacacccgagccctccccggccgcccccccctccacctcccccactcaccagcgccttcccagcctgcagcacggtcatcagctgttcccggaagccctgatccacgtccccgtcgcgctcctcctcctcgctctcctccccctcgctctcctcttcactctctgagcttctgttgtcctcaccttcctcgctcttgtcctgtgtggtagaggcaggcgcgtcacacacctccccgatcgtcccactccccaccgcccccgcccggcccatgctggcaacacctctgcacccttcagccgccgctcatcagaatcgtccgtcaccaccacacggtcattctcatcctcactggtctcggggttcagcacctggggaggggtgccagccactgacccatttgcagcccccgccctcctctccaggccccactcagccttgaccaaagacctccatttcccagaagaaaacggagcctaggagaggcggccaggccaggccaaggcctcgttgagacccctcccaccggccgcaggctcccggcagggaggctggaggctgaagcggcacccctggtgcagctcgctgctcagtgagccccagcccacattccactcccaaaggtcccaactcacatccagaattagctgcagggcacgcggggtcaggtgggagcagatgtggccaaacacgctccgggccacctggcgcatgaggtggctgggctgggccaacagggccagcaagatctccaccagcacctctacccacgggggttcctgggggtctgcaagagggaggggttgagcccggataggggaccgctggccccaccccaccactctagtccctctcgtgaccaaggacccaccgatggtcttggtgcggctccggcggggcttctctcccagacttttcctgatgcaggtctggatgtcacccagcaggtcacagctctctgcaggggactgcgggcagggtaggacacacactggggccaggccctgtccccagcccttctaaaccaggcaaggggctggccaaatggcagcagtggcatcaagaagcctccaacacccagccactggcccgccctggccagtcacccccacaatccagaacagaagaccccagctggacaccccaagagctgagggcttttgagatggagtctcgctctattgcccaggctggagtacagtggtctgatctcggctcaccacaacttctgcctcccaggttcaagccattctcctgcctcagcctcccaagtagctgggattgcaggcgtgtaccaccatgcccggctaatttttgtattttgagtagagacggggtttcaccatgttggccaggctggtcttgaactcctgacctcgtgatccacccccttgccccccttggcctcccaaagtgctgggattgcaggtgtgagcccccgcgcccagctagctgacggctttttcacacctaatacgcagttacaggatccaaaagcctgaaggggacaaggagtccaactcccccttggacactcaagaaaggcagaacctgacaaggatggtcagggtcccagagaagccagcaagccccagcccccaattcataattctagattattccctccatgcttggcttggcatgagagacagaattgaaagtcattagttttaactaatttaattacattgaactcatctgactggggataaccccagactcgagtgaggtggcgtggtgtgcgcatgtgcgtgtgcaggagctcttgaaaactgtgtgatctttggtacctaaaaagcagactttcccctcataatgcagtcggcagcttgaacgtttaggccagggtgggacaaagcagcccaaagcccttgtcattgctctccggctcccaggctgtgtgcccaagcaggtccccgtcctcctctgggctgcacctttttttttttttttctaagacagaatcttgttctgttgcccaggctggagtacagtggtgtcatctcaactcactgcaacctccgcctcccaggtttaagcaattctcctgcttcaccctcctgagtagctgggattacaggcacctgccaccacacctggctaatttttgtattttagtagagaaggggtttcactctgttggccaggctggtcttgaactcctgacctcgtgatcacctgccttggtctccggaagtactgggattacaggtgcgagccccgagcctggccagggctgcaccttttatctaaggctctgacacagcaaactgcagcctcctctgtccaagtcaagttcggagatcccaaggctgggggcaggctccacatgtgtcctggaatcaccaggactctgctgctatcaaaggcctgacgtcaagaattggaaggggcatcgtggccaacctttccccaaacagctcatccacatgctgggctcagaataaccaaagctggcaagtaaggcaaccacagtcaagtggccagacgggagcaagcaagagacccacctactcaggctacagaagacctaaagcagccccaataagagcagcttatgtcatgagaagaaaactcaaaagaaatcagggtactgagcctcgaatgtggtcagggcttcttgatgggaagaaccgagcgggagagcccgttgccagaaggtgttcccacagcagggggtacagtgcaagctcctttgcctctgagtcttagtttctccatgtcaaacatggagagggggtgtctgcctcaaagctgtggggattacgagatcctgcatggaaagcctaggacaccagctggtgccgctaagtggccggagggatgtttccacctgtgacaaagttggcttcaaaaacctcccaacttaactcccccagaacctttcctggaaacccgcacagccctcaaaagcctctcggtagggggcccattgtgccatagaaccccaggctcacagcccctccctcccaggccccagtaccttgaggaggtggatgcccacgaggagcagaaggtgctggaaggcagcagccctggcctctgcggagtgggcctccagctccttcagagtctgcagcatcctgcggggagacaggcgattcccaggcccctgcaccagtcagactgcagcgtcctgcccaccccctggaaatcccacgtgctcaccggtcccaggcctggcgctgctgcgcagtgaagggtgtcacggtggtcacgttgtggctgtgattcaacaggaggtctgcgaactgcaccaggtggtaggtccagggctgcccaccctgggtctggcccggtgcctgcttgaactgcgtgctgagggtctgcaacagactgggcaagggatggggcttggggtcagcagaccagatgagtcaatgtagccgcctccctccgccctccccagggctcggtctcccgcctctccaggacctactagaactccgggggcctctgccgttgttcccagcttaggggacctggagggagcaggcgccctcaaggccttcccaccttcggacctctcctgggctgcccaagactcacctgaagaaggcactgctgacagcctctcgggcctggttttccaaagggaaggagaacgggtgctttgtctcagggatctgggatgtgggcttctttgtgacaaagaacgagtggaacaaacaaaacctggggagggtgggagagtggccatagccattcactgccattggtttttacaggctcccctccttggatggtaccaccgagggtacaaggccaggaggaggaggagccgcccttctgccctgggtacagtcctcgggggcctgacgggcaaggctggagggggctgggctgggctaggatgggaaggggccgtttctctgctctggatccccagctgaacgcgggttaacccgagctagagagagtcagtgcccctctcaaggaaccaacagatgggaggctgtgtggtcatggccaagtcaggtcactgctcctgcgaacatgggacagccccctcttgcaaccgtgcatgttgagggtgacgtgagcacccagctctgcactggcacagacgaggcaggtgtggggcagaaggcttccctgacacctcccacgtgcaaaagctgcctgcagggcgcgcagagcacacctgaaccttttaggcccctgcagctggggtgcctcctgggccccttcccttcacgggttcctgaggaattcccaagtccccttgtgcctgccccccactgatgactcaacccaaaggcttctggctccaggggatgcaaactaggacgagttaaggggccccattccttggccacacgcccatgggaagctgggaatccagcacagctcgcacctggccacctgctcagtcaaggcctcctccatctccaggtgcaggctgtccacaatgctcaccaatcgaaagatgatccatttcctcagccggaacacagctcgctcaggcctagcggggcaggaggcgaggtcatgtgagccacttataactggcagaaacaggctgggcccagtggctcacacctgtaatcccagcactttgggaggccaaggctggccaatcactcgaggtcaggagttcgagaccagcctgaccaacacggtgaaaccccatctccattaaaaatacaaaaattagctgggtgtggtggcgggtgcctgtagtcccagctactggagaggctgaggcagagaatcacttgattgcttgaacccgggaggcagaagttgcaatgagctgagatcacacgccactgcactccagcttaggccacagagagtgagactctgtcaaaaaaaaaaaaaaaaaaaaaaaagaaccagcaaaaacaggacattcctttgcctgatctcagagacaacactccaagatctccccatcccgatcgccagtgtggggacacacaagtaaactgaggcctcatatgagagctaaggctcttccccctcgctcctctcatggtttagagccaggacgctgtggagggcgggcttgggtcgcggggctctgcaggcctaggaagttaactcctaaattaggtgtcctcccccaaggtccactcacatgtggagcgatgaatcctgggctttcttctggttgttggtgctgaagtcaaccaaggagtccaggtctggctggagaaacatggcccgcagccaggccacatagccctgcagggccggagggctcaggaaccgcacgacccgccagaaagtaggcgtgacagggaggccttggttggtgacagatgagaaggccactagcacggccagctgccgctcagggtcatcctggcacccctctaggaaggtgcccacgtaatcgtccatctctggggcaaacttgaactgctttgggagctgcaagagttaggcatggcgctgagcccaccagcccaggggggcaggcggttaacaacccaacagccaagggggcaggcgggcaacagcccaacagcccaacagcccgggggcaggcgggcaacagcccaccaggcttgtgcccactacaggttaaatcgagccccggcaatctcctgttgtacacagctaggctgtgcctgaacttgcaacagtccagtcaccccagtgcttttgtctggcgtcaaggcctctgtgggtctgactgccccagcttcagcacctccggccccagaaggcccctctttccgccttgctggatggggatggcctgttttcctggctcaacgcagggcagagtggtagttaggaggcgagactgacctgggttcaaagcccacgctgccaattcctagccgtgtcatcttcgggaccaaaaacaaccacctctcacgcgcttactcagtgccagcacccgcgctccgcctttttgggcggcagcttagcatttttagcaactctttgcggttggccaatattgtcattgcacaggtgagtacagtgagacacaaaaacacctagaggtaacttctcagggtcagaggctcccagtgggatagtgtccggcttcacagcccaagctgttttcctttcaattttttagacttgtgcccctggcatgtagtgccatgatcatggctcactgcagcctcaaaattctgggttcaagggatcctcccacctcagcctcccgagtaactgggactacaggtgtgcaccaccatccaacccaagctcttaaccactgcctgatacttcaagtctccccctcacccagaatgacagctctctgaaactcactgcaaagataaaatgagctggtgagaacagtcaacccagcagcacttactgggcaccaggctcactggtgcccaaacatggtcatgacgactgttctcatcactgccacatgggcgggggcggagagaggtctgaacagcccgctggctatccatgcccacaagggggcctgctggcagaagggcctgactttatcaaaactgtcagagggaagccaggtacagtggctcacgtctgtaatcccagcactctgggaggccaaggcgggtggatcacctaaggtcaggagttcgagaccagcctggccaacatggcaaaatcccgtctctaccaaaaatacaaaaattagctgggcgtggtattgggcgcctgtaatcccagctactcaggaggctgaggcaggagaatcgcttgaacctgggaggcggaggttgcagtgagccaagatctcaccactgcgctccagcctgggcgacaagagcaaaacttcatctcaaaaaaaaaaaatttgtccgagggaaaggggttcaggcagctcactacccagacggaggggacacccatagctctagccaagcccccgaggtgccctgctcccctttttggcagggagagctccacgtctagcctttctggcagtgtcgagctgcacgggcattacccaccttagcagtgcacacgtgctccccgtaatggcggatcacgtctccctgcatcaccaggtgcagctgctccttggtcagcaggggcagggccgcgcccagcaggcggaaacacaggtagctaaagggggtgcaggacagagcctggtcagagcccttggtgcccctggtgggaacctcaggactagtggcctagcccacttcacggacagggaagggggccgagagaggacacgcgtcgcccgcacctggctggccagaactgcatcttcagcagcccttgttccaccacctccttccagaaccgtgggaacttgtcttccttgagtgccaggcggagcaggtccagagcaatggcgggcagcttgcggtccttcttcacagaggaggcggccatcttcagcacattcaccagcctgcggagggcaagggactcagggaacacttgcctcacaggcaagggccagggtgacaagagcagccgggacacccccaggccaaacgacaaatctgggcctggccagatgcagtcccttggccccagggagggcaaatccgcccacctccatcacacctggggacattctcatctgagaataggttcacggatcccaccagcttcttgagcttggagggcaccttctgctgggccaggaggaagagctctagctgttcaggggagctgagtattatattcaagtcggctttgaggacctccggcaggatctcctgcaatgtggccttcgagacctaaggatggagggagaagaaatcgtgacttcctctgcggggtgagcctggtggatcctgttctacctgctcctgacacggggccacctggtgaggtatcagagtcatcagaggccagttgctaacaaaactcaaattcccaggcagcggggtttttgacaagcatcccactgacgctaactggcccctggaggtacctgccccccaccccttattttttttttttaagacagagtctcactttgccacccaggctgagtatagtggtgtgatcttggctcactgcaacctccgcctcccaggttgaagcaattctcctgcctcaggtgggattaaaggtgtgcgccatcacacccagctaatttttgtatttttagtagagatggggtttcaccatgttggccaggctggtcttgaactcctgacctcaagtgatctgcccacctcggcctcccaaagttctgggattacaggcgtgagccaccatgcccggtcaaagctacccttttaattattcctttttttggtatttcagagtactagctcatttcatacacgaggagccctaggtggagagctgggattcgaattcaggtccttctggctctgaggtcaagactgcacagtaagccctggcctggagacctgctacccctgcctttctcttcggtgacaaaagggcctagggtgctaccttcccaagtagggcagtggaggcccacaaggggccagccttgaccaggataacaatggcaaacgttttatatacttgccacgtgccaggcacagttccagagctgcactgcccaatacggtagccacagccacacagggctgctgagcgcctgaaaggtggctaatctgaacaggggtgtgcctaagtgtaacatacacactggattttggagacacctgacaaaaagagtgtaagatatctcaacacttttttataccaatgcacactgaaataatattttagatataccagataaagtcaaatgtcactaaatgttactaaatgacacctgtttctttttaccttttcaacaaagtcactgaaacgcttcaaattatacatctttgtatttctatggaacagtgctgttccagattctcatccgagcccccttgatgtctctgtaacaaagtgttgcctgggcccgcacagctggggagctcatacctcggagaggatgtccaccagggccttccggggctgctcctgcaagtggttttggtactgggccagggcctgcagcagcttcaccgacttcatcagtgcctcctggtcctggtccccacagagggacagagggtatgagcagggcacacgactgtcccccacccatcccaagccagcctacattcccccagtccctccaaagctcttaccttcaccagccgacctgactgaaagagggcgagcactccaaacaggtttgcaaagagagcaggtctcagcattgcctagaaaaggattccaggcacaggcatgaggggccctggaactccccattccccaagcctcccacccctggggctgctgacctccctggccccactctcaccttcttcacctgatgcaggtcatatttttcttgtatctgctgcaggatgctgcacaaggggaggtcttcaaaagactgtaacagctgccaggagttgtgtggcaggaggaagagggttcaggagagtggcccaactacgtcttcacaaaccttaacctcccttcccccttcaacttctcccaagaagcctcaggtccctagtcccaccttctatgtaccttctatggcccctagattactagtctgaaatgctcagccactgggtcttctctccgcacgtggtctgagctcccctcaggctgatcctgcaggcctgggtctttattgctctgccccttgtcaaggcgcctcagagagtggtctactccaatcagctgaatgcctctgcaggcctaagggagcccacccagcgctcactgctcccagaaagtgtacctaagaggccgggcaacccaagcaccaaatagaaaacctggccaggccttgctcacaccttctccactttcatgaagaggcctccctcaggttggcctccagtctgctctgccactcccgacctctctctcgggctgcccctccgccacagctgagacaccacacccgccctcctcataccccaccattttgacctggatggctgggaccctgccaggagcaccacctcacctgtgccagggccaaactgtagcagggccgggctgtttctcgcccgaccccgagtcccgtgattagacgcttcagggcatatttcatctcggacccctgcggaaccaagcacaccctcgtgttcaatggtgacaacaaggtgcacgcccccgcgcaccctggcatccaggttcgcgaccacgtgcccccagtctcaactccctgggcccgccgccgcttccttgccgggatatgcgcagcctctgccccagaccccgccactccaccttcggcctgccacgcagatactccagcagcttctccgtggccgcaagtcgcgtctcctgctcaggcttcgcaatgtcccagaagaagtccaagaactcgcgactgtgcttcaataggccatagcggtcggcaggccgggcgccactctgcgtcgcttctccaggcgacatcggctgggcgggatcccggctctccatctccgccacactcaccgaaacacgaaacacgtgtgctccggccccagccgcttccaggtcagggcacggcgcatgcgcaccggtttgtgtcggctcggaggcggaagaacccggaggggcgggggaaccaagagagaccggcccagagttaaaagagcggcatttccgccgtagctctgagcggaagtccctcgcctagcggcgtcccatctttcccagccttctgctcacacccgctccgccctggcggctgtggcatctgcccctttggagccccaggggggcatttctaagggcccatctcggaaacaaacctaggtgtagcacttcgatccgactcgtcccagagcggcccctgcgctccgaacattgagccattcaacaattactgggctcctgctggcgtgccgtgctaggcggttggaacaaagcctctgctctcgtggaggaacacggagccaaatgcatttaaaaagatcataattatgaagagaattaggaatgcaagggtcaggaggaggcttttaagtgctggaacgtgaatacatcacccgttaaaaacacggctaattactattcaatagggtctccaataatgatttgaggggttggtcagggaaggcctctgtgaggaagtggcatttgggatgagagctgagtgacaagaagggcccccctcccccgtactcctgcaaggatctaaggggacgaaatcccaagccttgcaactacagagacccagggctggaggggctgaggctggcgagaagcaaggctgcatggggccccgggctgggatttcattctgagggtgatgggaagtcactggtgagtttaatgcaggggcaagcctggatccgatttacattttaacaagatgatgctggctgctgtgtgggggatggactgtaggtctgcgcaggtggaagcacgggaagaccatttagagatagtggtggactggacccagggaaaatgagaacaggtcagatttgggctgatgtggagcaggtggggtgggtgatggagttagatgtcgggggagaggaaatgagggggatgccaggtttgagactgaaataactgggtacattgtggtgccattacggagaagaattttcttgggagtgggaggtaaaggtggtgggatcaaacggtctattaaatcagagaagccttttacaatggcaggggaggggaactgctactggtcaccctcgcttcttggtttgagaagctgtttatagagggctgtggtccagagaggacctaacccttgggggaggtcagggctaaccttcgccttgaatttccacacgctcaactccaacccctttgtacccaagcccctggggcgccttctcaccctctcagccgcttccctgctttgctgtctgttctagaaagtgaaatgaaaacattcaccttgcacatctggtgccccaggaggcaggaggtgagcggagcagggggaagctgaaagataccaacccaggctctcccctctctggttgttggtcacctgtgctgcccatcagggaagccctgactccagttgcttcaaaagctgttggaaaattaaccaagaagcaggaatggtgcttggtttccgggagacttgatctttattttgtacccagtctggttgaggcagataggtaaggggtgtcctgaagggaaggacagagatgccaacagtaccctgggctctgcctgtcctgcttcgtggggcccagggcctaggcagaggctctgcactctttccactgtcctcctgaaagctggatctgaactcagtgctagccccaggccctactgctttttcgttattaccctgattttcttagctgataaaatagctagagattccatccggtgtgggtgatctgaagaatgattgttagctctggatgccagaactcaagtctaggtaacttaaaaggccagaggttggggcctgagccagcagtgagcacataataaatccttttttttttttttttttttagacagggtttccctcttgttgcccaggtggggttgcaatggtgcgatcttggttcactgcaacctccacctctcgggttcaagtgattctcctgcctc[131 bp omitted]gccttggcctcccaaagtgctgggattacaggcatgagccaccgcacccagctatttttttattattattattattattttaaagacaggttctcactctgttgtccaggctggagtgcagtggtgtgatcctagctctctgcagccttgaactcctgagctcaagcgagcttcctgcctcagcctcccaagcagctgggacaacaggcatgtgccaccgcccctggcaaatttttaaatttttagtacagatgagatcttgctttgttgtctaggctagtttcaaactcctggcctcgaggtatcttcctgccttgaccacccaaagtgctgagattacaggtgtgaggcaccacaccctgcgggtgcacactccattgctgctgtgtctgctctgctcctgcccccatgcttcagataactctgccttctgccagacccacccccatcctgttagaacccctggaaggggcagcaggcatgggggacactggagacatgggcgtgctctgtgtgggctgccacctggagcagggtcccttggccacaagtgctgggatgctctgttggttcttgctgaccctgatgctggtgctgggcctgggtagggggccttgctgccagatgcctgagtagggtgtgagtcatggccctggccacatcaggggtccctgaagccacaagccccaacacatcagcctctgtgtcatccaggctgccacggaggatgagggggcaggcccaggcactagtggtagacttggccaccaggttgctgagcagaaccccagtgcttggggacaggtgtgcagagccaaaggagcagttgagcgaggaggtgagaaggagcacagagccgctgctgtccacggcggccagggcactgctctcggggctcacagcagtctgcaggaacggtgggcaggggtcagggatgggcgccccggagcgcagggctgcctccaacagtgccagcagttctgggccagctgagggactgggggtggtgaacaggatgccctggggcacaggtagctgctctgctggttccaaagtgggcctgggcacagccgagggcacctccacccccaggtctcccgccagtagactcagtagagcatccccagcaaggtctgaggtgggagcgagggctgcgctgcgaagcacagctgccagttgtgggttggtggctcgggccccagcgcccaggggtgtcccatcagcatggcaaagtagtggacagaggccttctgtgccccgagccaccagagcccttgccaggggtgtgtccaccaggaagccctcctgagccagcgtggtggggcccactagcaggcgtggccagggcaggcggccgaagcgtgcatgcagcaggtgcagggtgggcagagccgcgggcagccccaggccgggggccagggtctgtgctgggcctgatgtcagggccgtggaattgcctgaggagctatcgtggaagaggccccaaaacatggcacctgcaggagacagaggggtccctcagcagccgcaggtcaagggtcactgacttgtttcagtcaagatcccttgactgagcctgggatcaggagttactgaccaggcctgaggtcaaagttccacagacccgggctcaagggtcatagcctggggttggactgctgcccaaaccctaagtcctgctcacttagcagtcttgaggtcagtgctactgactccctaagttccaggtcactgatcaggctgtgggttggggttgcagtctggggtcaggggtcactgacctagccccgtggcatgaggatgcaccactgccaggcacaatgcagctccaactccagcatccacgacgttgcccccggcaacaagcagctctcggcctaggtgggagcatgtggctgcagcaaggaaggcactgtcatgcagcaaggaggggggctaggctgggctggtgacccctgaccctcccctccccaagccgcccccagcactgactgacctgcagggctgatgatggcaccgtggtggtatacgccagggccgtgggagtgtccgccgggtggaggggccacagagcccaagcttcctgtcgacctgccctgattctggagctgcctcacagccagggagcagccaacagccagcagcagcagggctgccactacacgggcccaggttccgggcagcccgccagccttgttcctgcagagggggggtgtcctgagccacggctgggacagagggatgcccaaggaccccaagagaccccagggaatatttcccaaaaggtttgatttagcaagaggagcacaagtcagccaaggagaaagggcttcttggcagcgggtgcatcttgggcagacatggggatgggaaagcatctggggaaactgagcctagctagggagggagcctctggaggggagattggtggggcagagtccactcaggtgggagggaggcccagtggggtgtggcaggcaggagagaaggggctggggagcaggcccagccaggcgtagtcaggccccaacctgcccagcaggtgcctcctgcaccaggacttgggggctggggacctttgacaaagcagcagatgggacagaggctggcttggtacaaatgtccctccagatgcacagacttttgattgggtcaggccaagtctcgggctacagcctgggttttcccccaaattgaccgtacagtgcctggagctaaacccagcggggagtcgcctggtccccctgaggggctccagagagagggacttgccaacctcaagcctggggagcctggtgcccagacccctcccttacttacctggaagagtcctggtgcctccgggggtttagaaccagcgcctctgatgtctcctcctcctccacttcctcctccgactccaagcttggctcccagggcagcagcttctgatagaccacgggctcttctgcccgctccatggccccccagtgctcgccccagccctcctgcctgccagcctttccggctgtgtctcagaggccctgcccaagcctggcaggtgggaggtggcagcgaccttggggaagggtgggggtggaatccagaacaggtctgggcagggcacggggccaaggaggctgcatgtgagcctgccccattaggacacaaggcccgaggagctctcgcgacagggttcccggggtgactgcctgtaaggggccacagctcagtgaggtcgagaaggagttcagccttaatgccacaaccttgatactcagggcacctgctgggctcctccccttgggggatgtagcccatggatcccacccacctgggactctagggactgtggacttgaattagagctacggtttcacggtggcttgggtcagagctcccacgtgcttgagtctgcacgtgactaggttctggcgtaggggtgtctggtctctggccggggtcaaggctcagcctgtggctactctgggtctgggtttctttgaggagcaacttggttcgtaactccctgtgcgtgttttgcgactcttgtccagaaggtagcgccacagcctggaaaccaacatttctaaattcattctgggattcccatcaaggacttgttgcaaaacagtgctgtttgtaacagtcccaaattggaaagtgcccaaacatccattatcgttagaatgaatgatgtaagtcacaatggaccactctgcagcaaagagagtgagtgatctacaattatatgcaataatatacacaggtctgacaagcataaggacgagggaaagcagccaggcaggagacagcgcacgctatatgctttcatttacacaaagtacacaaacaggcaacaacaaaagagcaacaacagtctgcccttagaagtcagatagtgactggaggaggtaccagggggtttctggaatgctggagatgtcctttctttccttcctttctttcctttcctttttcctttacctttcttttctttctcttctttctttcttgacagagttttcattcttgttgcccaggctggagtgcaatggtgcaatctcagctcactgcaacttccacctcctgggttcaagcaattcttctgcctcagcctcccgagtagctgggattacaggcacatgccaccacgcctggctaattttttgtatttttagtagagacagggtttcaccatgttggccagcctggtcttgaactcttgacctcaggtgatccgcccgcctcagcctcccaaaagtactaggattacgggtgtgagccaccgcgcccggccgagatgttgtttcttaatctgagtgttggtgacacgagtgccctgggtgtgaaaatgcattgagttgggcattgatgacgtgtacttttctatgtgaatattgtctttcaataaaaaagtaaaaatggaaaagctcaggtattttctacattaaaacaacaaccataaaaatcatcctttgaatcatccatcatcccatctggctctccagctgcttccctttctcatggcctcttcacgagcaagtacacgggttctttaagattggtgtgcatcacgatcacctgaggagcttgttaagtcagatcgctaggctcctctcctagaaagtctggcttcaggtgtagggtctagaatgtgctatcccaattgccacagtcctggaaccacaccttcagtctaaaaaaaaagtgtacacctgctgtgttcacttctttctctcctgtttcttcccttagctggtttctgtctctagttccccagagaaacctttggtttccttttttttttttcttgggccaataaaaaaccaaccaaccaaccaaatagagcagcctagggttgccaccttctaattttgccaatggtggggagatgggaatcaaaatgaccatttttatgattttatgacatttatgtcataaaataatttggtttcactttctgttaacacagggtaagaaggttagaatctcagaatgaaggtccatccttccttcctgggaaaaggcatctgagagccttagggctctgtgctgcccccatctcctgccccagcctcagcctggccttcgggctcctagcattattccttttgtccagcaggcagaattattttcggcccctaccctgcccagccaacattcctctgctcttagagctaggtcctgacaagttctttggacaagacctccactagttaggttctgggaacatttcctagttcccagaacctctcattcctttctcattcctgcagctctggacctattagctaagctccaattcgatgtagctgggtgctggggataaacgtgctcaggccaaagtagctccaggggtagatggagtcagtcatttgagggctcagagtaggggtgggggttggcaatggcttctggagaactgggtctagttctgtgtctgctagtaactgaatatatgactgcaggtgagatatttaacctctgggagtcttgactccacttctgtaaaatgaggataacaatatttgtcctcctagggttgttttgaggattacacaagaaaatatgtttaaagcctctagaccagtgcttagtacagagcagtccctccaaaagcatgagttcctttctctctgctctgtgagcctcagtctccccagtgattattatggataatctacattcgcatgtccatgcacacacacacacacacacacacgcaaaaggtggcttgaagtctgtagattcattaatttcttcattcatttcttcattcgtccacttatcctaatggttctcaaccttagatacacattacaattacctggcaagctctgaaaaattctaatacctatgcagaccagttaaataatgaaatcaggacctctaaattgtagcttcatccattgttgaagcttcccaggtgttttcaatgggcaggcaaggttgagaaccactgctttagctagtgatgtctgcaattgaaatcacctgtagcaactggaaaaaccccaaacaccaatatcctggtccctccctttctcatactcccacgccaattgaatcagcttctctgaaagtgagtctcagtcatgatgatgttttgttttgttttgagatggagtttcgttcttgttgcccaggctggagtgcaatggtgcaatctcggctcaccacaacctccgcctcccgggttcaagcgattctcctgcctcagcctcccaagtagctgggattacaggcgtccaccaccacacccggctaatttttgtatttttaatagagacagggtttcactatgttgaccaggctggtctcaaactcctggcctcagattgatctctcagccttgacctcccaaagtgctgggattgcaggcttgagccactgcacctggcctctgactgctccttctaaccaagaagggacccctgagacgaggaacagggaagagtatggaccccacgtgtgtgttaagtctttccccaggttgactttataattggccttcttggacatgctgggatttaactctaattatagaatggagacaatgacgtatgcgtatgtggcagggttgggggtggggatagaaggggcttttctttgcaaggtatctctctctgtgcaatgtgaccaaaatgccagaatattattgttaaagtacttttaaaaaattattccaggtgattccagttgtgatacaatggcattcagaaattcttaactcagagccagcatccaatagtccctgaaagacatgggtattcccatttcctgagtttacagttaccctagtaaatggcaaatcctcattctttttttttttttttttgagatggagccttgctctgttgcccaggctggagtgcaatggcacgatctcggctcactgcaacctccacctcccgggttcaagagggaacaagagggaaactctgtcttaaaaaaacaaaaaaggtagtgattcctatcatatttcagtttaatttaggggcttgtacaaggcagaagacagatgggccttggaaaataacagtagatatagtttaaaaaaaaagtcactcaaattgtagctgctgttctaggtgtttctttttttctttctttctttctttctttctttctttctttctttctttctttctttctttcttttttttttttttttttgagacagtcttgctctgttgcccaggctggagtgcagtggtgcaatctcggctcactgcaacctccatctcctgggttcaagcaattctaccccagcctcccgagtagctggaattacaggtgcccgccaccacacccggctaatttttgcatttttagtagagacaaggtttcaccacgttggccaggctggtcttgaactcctgacctcaggtgatccacccacctcggcctcccaaagtgccggggttacaggcatgagccaccatgcccggcctctaggtgtttctttatggggaaaatcaacatagctcctagaaaatgctttctttcgttttttttttttttgagatggagttagtctctgtcacccaggctggagcacagtggcacaatctcggctcactgcaacctctgcctcccagattcaagcgattctcttgtctcagcctcccgagtagctgggattacaggcatgtgccaccatgcctgggtaatttttgtatttttaatagagacggggttttactgtgttggccaggttggtctcgaactcctgacctcaggtgatctgcttgcctcggcctcccaaattgctgggattacaggcataagccaccgtgcccagccaaatgctttgttctttatcccaatagccagataatccagaagtcatttgtttttacctggtagggacagcagtgcacctttacaatcttgcctcagagttgtggcaacacagtatctaatggtcagtgtcagggatataaaccatggcagctggtgctcagatgaggtggagacagtggtgccttccccagacagttctgcaacgtgattttgagcattggtcttggccgcatagcctctgagctagctctccaacagctctaccccccatccactttctgtgcccatagatttttcataaatttattttctatttaactcaggcagaagcgtgtcttttgtttacagttaataacactgactgctgcatatacttctaggagtccctagagggcagcaaacagcacttgcagtttgaagcgggaaacagggaggcagaagcagcgccggatcacattggatcacgctggatcacgttggacgctggctcaaagtctctgcagaggtaaagagggcatttgtgctttcctgacctgttggctctcaggaagagtgtgtcttagacctggactaaggagactcacactaaggaagttcaattccagcaggagcccattgctttgtcaatttttttttcttcatatttctaaagcagaagggatgaattatgaggcgcttgtggtgtctctttcctggtagcatctacttctttattcactgcttttacctcttgtcaaacgtattctagttgcctttgggcctcagcctttgtcctgtacggagagtcttatttatcttagacattacctgtgtgccaccacaaccaggttcctggctgcc[135 bp omitted]ggttcaagcgattctcctgcctcagcctcccaagtagctgggattacaggcgtgcaccaccacacctggctaatttttgtattttttttagtagagacagggtttctccat[138 bp omitted]aggcagagttttcctctcccaagtagctgggattacaggcatgcaccaccatgcccggctaattttgtatttttttagtagacacagcgtttct[138 bp omitted]gtgtcgaatcctggggagagaagccaaggtcattagcagttctagggtttggggctgacctagaggaaaatgaccacgagatggcagtagcaggcaatgagctttattgggatggctctgggacagagttacctgtgaggggaagtcccccgtagcaggggtccttctaaggatagtgatgcagggccaccatccagaaagagaagacaagagagcttctggggagaggggtatcagagacggggtttacatgtctagatgaggaggggtgtctccgggtcaaagaactgccaagggcagccctggcttgggcttttacagccccagggtttgtcctctctatggccagcagatgttgggtgcagtttggcagggtatataaagcaggcaggctctaagtggctagaaatatgtttatttgggctttttaatttaaagcaattggatgtgtaaaaaactgagtttagctctcatggggtttttgagctagcagtcctgttgcgaagaagtaaacagcgtaggactcaaggcacaactcatttatatgacagaggtgaataacagtgcctgcctcccccactctctcccactacagaggtcgagggagcagatccttcctcagtctcccctgcttgtgtagccaaggcaaacatggggcctaagctcagtcagttcgggaattgtccccaggtctttaaaattttatttatttatgtatttatttttgagacagggtcttgctctgttacccatgctgcagtgcagtggtgcagtcgtggctcactgcagccttgatctcctaggctcaagtgatcctcctgcctcagccttttgagtagctgagatcacaggtatgcaccaccatgcccagctaatgtttacatcttctgtagagatgaggtttcgctatgttgcccaggctggtctcaaactcctgggctcaaccaatctgcccaccacctcccaaagcatctatattttctttttccttttttctttctttttttttctttttcttttttttttttttttttttgagatgaagtctcattctgtcacccaggttggaatgcagttgtgcgatctaggctcactgcaacctctccctcccaggttcaagtgattcgcccaccttagcctcacaagtagctgggattacaagtgtgcaccaccatgcctagctaattaatttttgtattttagtagagatggggtttcaccacgttgcccaggctggcctcgaactcctgagctcagacaatccgcccaccttggccttctaaagtgctaggattgcaggtgtgagccaccgcgcccggcctagattttctaactgggaattattaaatagcctgggtttgagccactgtacccagccctccccaggccttttcatatgtgtgtgtgacttcagtatttggagatttggagattagaatcattggccagtctggccctatcgagagactctgccatgctgcttctcgattctttttatttacgtatttattttaagacagagtcttactctgtcatccaggctggagtacagtggcatgatctcagctcactgcaacccccacctcccgggttcaagcaattctcctgcctcagcctcctgagtagctgggattacaggaatgtgccaccacaaccagctaatttttgcattttttagtagagacggggt[145 bp omitted]caggtcactcctctgaaccacggaacacaggaatgattttcccaattctccaaagagtctttgccctttcgctttcttcctgctggaattccgactctaggcctgggccccggggatggcaaggctgcaccaaggacagtgcggcaggcagtaaacggaggctgggccttactgacatctcaaccagcggtgtcagccctggactctagatctttacgtttcttgtcacatgggcaaaataaagctcctttgtgtagctgtgaggttgaacaaataggactcacagtctgcctttattttaatctcctaatctccattcaaatgtgttttgtggggatggcccatcaccattcttttgaatggaatatagggcaggcccatgtctttttgggacactctcttttggtaaaaagtttttgggtcacttcaagttataaaagtttcatttcaaccaggcgcagtggctgctcacacctgtaatcccagcactttgggaggctgaggcgggtggatcgcctgaggtcaggagtttgagaccagcctggccaacatggtgaaacgccgtctctactaaaagtacaaaattagccaggcagggtggtgggtgcctgtaatcccagctactcgggaggctgaggcaggagaatcacttgaacctgggaggcagaggtcgtagtgagctgagatcgcaccactgcactccggcctgcgagattgagtgagaacctgcctcaaaaaaaaaaaaaaaaaggttcatttcaataattgcaattaaaaaataagcgtggtcccattcatggagctggagggtagagcagtggttgccaggggctgggggaggtgggctgggacttgttgtttaatgtgtgtggggttccgtctgggatgagtagcttctgtggatggctgcgcaacagcatgagcatatttggggccactgaaatgattgtaaattggttaaaatggtaaattgtgtgttatgtatattgtatcatgatgaaaaaatgcaaaaaaaaagtataagccaaaaaaacccaaaacaccccacagcccctcccccaaatgtaaaagtccatttaaagttaaaaacttctcccttgcaccttctcagtctgttttgggcaagtagcatgcaacaggaaaaggctgtgtgtgtgtgtgtgtatgtgtgtgtgtgtgtatgaaagggtatggtgaagagggagagactctaattaacttctcaatgtaccctccaacccccacctgctcctacaccctgggattctcctcctcactcacttggctgcttttgtacccccagggttgacatggcgggggaagaggtaaaaaggggcaggaaagatctgattttgtattgtacgagctggtacagaagcttcctgggctttgtatacagctgactttttatctattgggacactttttaaagtccttccaagacctccagccgaccccattattggggtctcacctccaattccccgggtatagctgaactcttcttggctcacaagcagctcaggcatcagtttcttgctgctggggccgcatctttctctccaggtggtgttcctgggcaggttttattctttttttgttttgttttgtttttttaaataactcttgctcaaggttgggcaggttttaatgtggcctgatgctggttctccctccctcatagctcacatctggtccataggaaacaatcacacatccttttcctacaagagattttaggggtaccagtttccagtgcagccaactctcttcaagatgtgatcaaaaccactatcagccagcacatctctcatgcactgaatttaaaaacttttttttgtagagatggggtcttgtcatgttcaccaggctggttttgaactcctaggcttgagcaatcttcccacttcggcctcccaaaatgctgggattataggcatagccactgctccaggacttggattttaaaaatccgatttattgaggtatttatatatatatatatatatatatttttttttttttttgagacggggtcttgctctgtcacccagtctggagtgcagtggcacaatctcggctcactgcaaccttcgcctcccgggttcaagcaattctcctgcctcagcctcacaagtagctgggactacaggcgcccaccgccaagcccagctaatttttgtatttttagtagagacagggtttcaccatattggccaggctggtctcgagctcctgacctcgtgatccacccacctcagcctcccaaagtgctgggattacaggcatgagccaccgcgcccagctgaggtataatttacataaagtaaaagtcaccaatttttgtgtatattgccagcaactgacaccacaattaagacaacaaaggaaccgattgctcccgcagccaacactatagttcaccatggaggaccccgtggatagttccaagcctccctctgcatgaccatttcctgggcggaagtcctttgagctaagtgggaaatttgggcagtacccaacctatgtagatgaaccacatcctggcactggggaagtggaaaatttagagcacccaaattgatgctcgatccaacccattgatcacacctcatcccatcacagcaagttaggtgtttctctgctttttgtctgaggtgttaacgtgagaatctcttatctgtaggactctccagggagttgtatcttatgattccagtagtggaaagaacaaaatcaaaacactgtatggcgaaatcctcaacgggaaggacctggaattcacatccttcgagatatcatctgtacctcagcactgttgtgacccggtgggcaacatagtagcagggtcgagggacaaaatgcatgctaatagtctctaggctcaaaaatgattcaagaccctgatggtgtctctccaacgaccaacacacagggatggtgccaacctgtcactcaatgacaacgcagggctggtgactaactggtttaattcgagaccgtgggtcggaccacttgtctgtgctttgataatggagaatttgagtccctggaaaaagctactcgaccaggttagactagtggctggtagagtgcgaatgacaacatgctataccatcaagatgttcctggatcagtgtactgaccgatctattgcactactgtcagttgtaaccaagattgttgtattcgaggagaaagacacttgcctggaaaacacacggaaagttttttgagtatgggggagccctgcaccaccccattatgatttgaggtctctcctcggatgctcccaaatctggcaacggcggcaaactattgggctgaaagactcaatccagtgtattctggatttaaggctcatgacataatgcccggagcgaatatcacacttccacttactcagatggctgcctctcactgagtgtcaagaggaacagggacgggcatatggtcactccagctttgaacatcctaaagaattatggggtaacaggctacaaatgaatacggtcagttccctattaaaaaaaaaaaagccgctcctcagacctcagcagccaagatggtgaaggagatcgagagcaaacttgctttttaggaagccttggatgccacaggcgataaacttgtaatagttgacttctcggccacgtggtgtgggccttgcaaaatgatcaagcctttctttatcccctctctggaaagtattccagcgtggtattccttgaagtagatgtggatgactgtcaggatgttgcttcagagtgtgaagccgaatgcatgccaacattccagtgttttaagaagggacaaaaggtgggtgaattttctggagcccataaggaaaagcttgaagccaccattcatgaattagtctaatcgtgttttctgaaaacataaccagccattggctatttaaaacttgtaatttttttaatttacaaaaaaatataaagcatgaagactataaactcaaataccatctgggtgacaataaaacattatttctaacactttaaaaaaagacaaagaccatttccaacaaccaagcattttcctagtacccctttgctccacccctcacctctgctccttgacaaccactcatctgattttgatccctatatgttgctgtttacctaagaaatcatgttttgaggacttatatattgtaaatggaatcataccagatgtacttgttcatatctggcttctttcacttagcatgaagactttgagaagcatccatgtcattgcgtgcatccgttttttcttttcattgctaagtagtgtttattgtatctatgtaccacaatgtatcgattcacccatggatgtagactggatggtttccaattgtttactataatgaatataggcattataagcatttgtgtacaaggctttgtggggaggtatgttttcattcttcttggataaatatctgagtgagattgccaggtcatatggtaagtatatggttaactcagcaagaaaccaccaaattattttccaaaataactctgccattttgctttcccaccagcgttggatgaacgttcagttgctctatattcttggcaacacttaagtattgtcagtttttaaggttgtgcgtgtgtgtgtgtatgtgtgtgtgtatatgtgtgtgtgtgtgtatgtttatgtgtgtgtgtgtatatgtgtgtgtgtgtgtgtgtgtgtgtgtgtatgtgtgtgtgtgtagtggcatctcattatcgttttagtttccatttccctaatgtctaatgatattggacatcattttattcacttattgccactcatatatcttctttgctgaagtgtctgttgaaatctcttgcccattaaaaaatcaggtgattttgttactgaggtgttgttattgttgttattgttctttttagacagagtctcactcttgtcactcaggctggaatgcattggcgccatcccggctcactgcaacctccgcctcctgggttcaagcgattctcctgcctcagcctcctggttgtgaggttgtctggagagtctgtaaaaaccaaggccatctgttggtggcctcagcttggttcatattgggctgggctccagacagaggtttcctcagaagtgtctactatggggctccacctcatgtgagtgatgcatttctgggaaagtccctgtgagcttggtggctctgctgagccacaggcacgtggcgtggtctttgccatgaccttggagaggaggcgtaggcactctggctcatgctcactaactggcagcgtgggtcccagtgccagccaggctcaggccccagtcctgctcggcatctacaccgtggcccatcccctccaacttcagctctgctgtcttccccgcccccagagactgccagcaccagctcctgtctcccctgcctgctcctgtctcctttctcttaaggagaaatctccatttttggtctacaaaactgtctgtcttttgttattgatcatgtttgtgtcattattactttttaaaagatctcatgtctatatgtttgaagcagaaggagatggtttgaactatctcaatcagaaacattgtaacttatctacgtgtgtgataccgctgctgttacgaactaaattttgttccacaagcagatccgcagaaatgcacataccccggagctgtgtgttattcttcaacttgcattaaaacaactcacatcaagcctgtttggacctgttggtgaccaaggtccagctcagcctggggcaacaggacaaaggtgaaagcaacctctagtttttattaagagtcaattttaaacatatatgcatattcattcattttcttgtgtgtgtgtgtgtgtgtgtgtgtgtgtgatcactatgtagcagacataagggccttcgtaagggacttacagacataagccaatttaatcctcataacaatcctaggatgcagatactgttattatgatccccattttacagataaggaaactgaggcccaaggagtggtgagccatgactgggatccagagtcccgcggatctctctgctgtgtgtgcacctgtgtgccctcgtgccttagcttgcatacaagggtgggggacatgaagtccacgctacctctgacagtggcgtgcttgtccacagccaagagtggaagggggaaggacaggagagtggcagactcagggcctggcttggggacaccagccctctgacccagacatgctctgcccacttccccctgcctactcactagattcagacgcaagagtccgagactgccaaggaggcctggctgcagcagggtcaatggggtctctctcccactctctcccatccccagcccaccatcaggaccaatctgttccctgcaggctgtagggaccagggcctggcgaggagggagatatgtgaagacagctacctccttagaggagagggctaccatgccacctcactgcggttctttatgtctagagacacagcaagatagagagaatacgggatacaggacccag[132 bp omitted]cgaaacccgtctctactaaaaatacaaaaaaaaaaaaagaaaaagaaagaagaaaataaaaattagccaggagtgatggtgggcacttgttgtcccagctactcaggaggctgattcaggagaattgcttgaacccgggaggcggaggttgcagtgagcagagattgtgccactgcactccagcccgggtgacagagcgggacccttgtctccaaaaaaaaaaacaaaaaaaatacagagagccaagatggagaggagcaaagacagagaaacagagactgggaggtggagggaagtacctggagggcatctgaaagtgagcctgtcgggagagggagctggggtgagtcaaagctggtacaggaggtggccgtgcaaggaacgagtccccggccatggggggttagagctctggggagtccgagtcaaaaaggcctggagccaggggttcctcccaccacccgtgcggcccggtatcaggtggggctgggctggggctggagtaagcgtgcatattgtatctagtccctcctggctgctggcctggtgtccctggatctggggataggcgcccggcctcgtggtgccctcctcctgcatgggccagttggctccaccctcccggtgccagtgtcaggttccaggctgttccccgggggaactttgatctggaaagaatgagggtgaccgatctggctgctgcacagggccgagccgtgtcaccgagacctggcctgagctgcccctgccactttcccgcccactgggacaccaagcggttaccctgggctcaggagacacagagggggtctttcctgcttcccttccctcccttctcctcttcatcatccattgtttattcagcaattcactcattcatcaagtattggctgatggagtgggggtgagtgatggggacagagggacaaggagacagggtcctgccctttagagagcccctcacctgataggggggcaggtggcccacacagacacaccctaaacagagaccactgcttgagaaacacaagccctgctttggaggaggaagatggggagtgcgaggagggatgtgtcctagtgggcaccgtgcagggttagtggaggtaaggaggtaaggacaggctttatcagggagggcttcccggagaagggggtggttaagctggaccccgatctggaggatgagcagggatgtgtccgtttgagaagtagaaggccaggcacaatcacagaagcacgaaagagttttgtgtttgtgtgtttgtgggcggcagcggctgagaaaggggggttggagaggtgggtggggggctggttaggaagggccttgaatggccccctcaggcgttcccctgttggcgaggggacccatgagtcaggggtaggggtcctagctgggacaggttgtcaaatcaagacacagctgggggctataggggaagcggcagcttgatggcacctccgggccttgccgaggaggggctggtgcctccgagacctcccccgccagccccagccccagttagtctccacggtacttttgaggaagccccgctgatctatgggctgcagcggctccagtgggctccaggcccagggctcagcccagcccctgccttggcctggcctccccacccccactgcccactctgactgacgcagccttttgctgggctgaaagcagacactgcctgtgaggcccctggggaaggcccagggggcagagccccggagctcgggctcctcttgtcctgaaggctgctgagccggggcctatgaataacccctcccccggccccgtctctgagaagggggaagggaggcaggcccaggccaggctgaaggcaccaggtcttttggtgggaagctgtggagggggtgagggaagaaggggacagggcccacggttggagatcctctgggctggagcagtcaagctccacagggagagtgcgtgcagggactgttgttgtaagaggagcggccagtcctccttcctcccatctctgggtgggtttccggaggtccaagagtccggatatgagctctgagggccacccaggctgggcctggcctgcccccagagaccccctcttcaattcccagtggcccaggacaaacttgtccctgctttgcctgaagaccttaaacatgtgcctgttcttcctggactcagtctcccctcctggctttgcagttttcagggtgggagctgagtgggtcagtgtagagccctctccaggccatggggccagggcttaggggctgggacccaagggggaggatcctggaaatggaaaatctgagcccaacagccttatctgggctggaagcagctgtctccaccccacaccctgcgcagcccccgcctcttgggggaggacagcagcccctctgtgcaggaataggtggtgtttgttcaacgggtagcctgggcctccgcagaggcctgtgggaaattcttccttagtggggtcaagaggttggtgcaggagggcaagaaactctgctcactctcttctttccccacatcacagccatcctgatttttttttttagatggagtctggatctgtcatccaggctggagtgcactgcaacctccacttccccagttcaaacgattctcgtgcctcagcctcccaagtagctgggattacaggcgcatgccaccacgcccagctaattttttgcatttttagtagagatggattttcttctttctttttttttttttttttcctgtttaacaaagcacatcttgcaccgcccttaatccatttaaccctgagtggacacagcacatgtttcagagagcacagggttgggggtaaggtcacagatcaacaggatcccaaggcagaagaatttttcttagtacagaacaaaatgaagtctcccatatctacttctttctacacagacacggcaaccaaccgatttctcaatcttttccccacttttcccccttttctattccacaaaactgccattgtcatcctggcccgttctcaatgagctgttgggtacacctcccagacggggtggtggccgggcagaggggctcctcacttcccagtaggggcggccaggcagaggcgcccctcacctcccggacggggcagctggccgggcggggggctgaccccctcacctccctcccggacagggtggctgccgggcggagacgctccccacctcccggatggggtggctgcggggcggaggggctcctcacctctcatacggggtggctgccgggcagagggtctcctcacttcccagacagggcggccgggcagagacgctcctcacctcccagacggggtggcagccgtgcagaggctgcactctgggcactttgggaggccaaggcaggcggctgggaggtggaggttgtagcgagccgagatcacgccactgcactccagcctgggcaccattgagcactgagtgaaccagacaccgtctgcaatcccggcacctcgggaggccgaggctggcggatcactcgcggttaggagctggagaccagcccggccaacacagcgaaacccgtctccaccaaaaaaatacgaaaaccagtcaggcgtggcggcgcgtgcctgcaatcgcaggcactcggcagggtgaggcaggagaaccaggcagggaggttgcagtgagccgagatggcagcagcacagtccagcttcggctcggcatgagagggagaccgtggaaagagagggagagggagaccatcgggagagggagaccatggggagagggagagggagagggagagggagacggagacggagacggagacggagatggagccctttttttttttttttttttttttttgagatggagtcttgctctgttgccctggctggagtgcagtggcgtgatctctgctcactgcaacctccgcctcctgggttcaagctattttcctgtctcagcctcctgagtagctgggattacaggcacacgccaccatgcctggctaatttttgtattattttagtggagacagggtttcaacat[138 bp omitted]ctgcctcttctagaggcctacttctgattagagtgagccagaactggggcatgtgatatacgtgttcaaactcatgctcacacaacattatacctgcaaacatttaatatatggaagcatgtgtacacatgtgacacatgtacaagcatgtggacagtatcagctgcataggacacgtcctgatgtctacactgacacaggtactggaggcatatatacgtatgtgtgcatataaacacattccctacctacaagcaagcgcattgaaaaaccctcctgtaaacacgggtacttacaaatgtgcacatactccacacaccacctatcctcgccggtaaggagtataaacacctgaactcccagctctttcctctacacagacacacccacacatgcacatgcaagcatcacacatgcccagacgcatcctcaggtacacgggaaagagatgagcattgaaaggtagacgtgtgtctggcagaatgtctgctgggatggagggacggcatttaaaggagggtttggtggagcggagttgaagttatccagagggcaggagggtcccaggatcagcccctgtggctccgcttcaggcagacagagctgtgggtctagggcagagacccatgcatccctctcctgggcactgccctgggacccagctggagataagacttggaggctccaagacgtgcccagcatggggcccccactcctgcacagcctccaccaagttctctacctccctctttatcgctcttcttggctcctgaatccagcaacctggcaggaaaagataaatctaagccctgtgttcccacccctatggatctcataacaaggcaacagtttccagggcagaggctggatttcaggatttgggaggaggaggggtaatggcgtgtttgccagggtggtggggtccagtcctagagtgcacgtctcctctgaggcctcattagcttgctccctgtgggtgcctgtggctgcagaccacgacgagtcagagggtatggcaggatgcacacaccttcctgattgtgaccttgatggccaggccggctagctgccccacacagtgagacctccgtgggggtgtgccagggccaagaagggcctgaccctccaacctgactccttcctggtggaggggcttggagggatccccagtgaggtgtgcagctgcctttgacccagtgaggaggctgatgcgagcttgtagacaggccggggagccccacagctcactatccctctaacgcaccttctctgagacccattttattttattattgtatttcattttgagacggagtctcactctgtcacccaggctggagtgcagtggcatgatctcagctcactgcaacctctgcctcctgagttcaagcagttctcctgcctcagcctcctgagtagctgggattacaggcacacaccaccatgcttggctaatttttatatttttagtagagacagcgttttgccatgttggccaggctggtctcgaactcctgacctcaggtgatctgcccacctcagcctcccaaaggagggatccacgcctgggattacatgcgtgagccactgcacccagcctctgtgacccattctaatgaatggtacctccatatccccaagtcagaatttgggagccatccttgcctctctccctccctcattctccattgtccatccatccagcatcctatcggttccactgactccagtgagtccccttttccaagaggacccaactaacacatgtttattgagccattactaaagccagctgctgccccaggtgtggggacagcctaatggctgagacagctcctgctctccagggatggagtccaatgcgtgaccgtgtgtgtgtgtgtgtgtgtgtgtgtgtgtgtgtgtgtgtgtgtgcaccatgcatgtggacctggggtgcagagggctggaggggtggcgccaggcaggtggacagagcccactcccacctcagttgggggattcagccgtcccactccttctgtcctttccccacgctgtaagccctgcttgtgttccctcagacctgaggagtctggagagtgtgtgggaagttcaggggagaggctgggggcaggcggagaagtgggagtcgtcggcactgaggtgcaagcagtgtgcaggtgtgggggtgagtgagaccacccaggcaggtgtgcaggtgagagggaggaggcccagctcagagccctggggaccacctcagtgaagggaggagcagaagcacagtcaggaaggtcactggggagggaaagaggagaatcacgtaagtgaggaggaggagggagtggtcctggggggtctcgagggccatggggggcactggagacctctgaggagcaatttcaggggagtaaggcctccggccaatccggggagcagggaggagctgctctgacctggtggaacctgactgctgtactgggaggtgagctgggactggcgtgcaggaaagagggtactgcaccttgggtgtgggggcagggcccaggttccagtactgtctccgcatgccttgctgtgtggccttgggccagtccctgcccctcttagggcctcagtttccccgcctcaggcccaaagatggtaacttccctaactgtggatttgattttgtgagacattggcaggggggctggggaaagcttgtcctgcatcctgcatccagcctagactcagagcagagcaggacgacggtgggcagcagtaggggcagagccaggagactggagtgggaagggcaggcgccagggcccccaggccttggtgggaggttggcctccacttgcttgctgacatcagggctggtgaatgtgcagggagtccagccaggttcacgggccctcacctccctcgcagcctggtactgggcaggagtggagctaaaggagagtgggggaggggcctgcagggaaggctcacaggagcccctgggcctgggaacagagctgcagcctcggtccatctgtcatggagccaggtcggagggtggtgctgaccctccatcccgcccccttcccaccccagaatcactctcttcctcatgctcctggctcttctctcctctcctgggtgcatctccagctactgactcggagatctgactgctgagaaaaaggagccaagggggatggtcttgtaccatctgccttcccagaacccacagtgagcccccatctctgcccttgacagagtcccgccttcggccccagaagcagccatgccccgtccccgagaagttcctcctagagattcccatgtggctcaggagagaccagataactagcctgaggctggagagtgtggatggatcccaggcagccacaggctctacgatctgtcacctcctcctccctgccaggcttcccaccaatggcccagccagcctgccttctcccggaggatggagagaagcctagagaccagcctgtccagtccctctcaaggcttctccacacggtccttccttggatcttagaagggaagggactgggcttctgtggctgagaccagggtttttgaactccaggttcttgtgctgagacctggaggggctttgagtgctgtctgcggcaagagcagcagcagcgtctctggaggctgctactaaagattccacctggagaaagcattcagggagcagtttggctcaccctgtccagatggctacctggaatgcacacacatgctcacacatatatgcagcatgcacaccttttggcatttgcctttttcatgaaataattgctggaaggctccttggattaggtaacccagcgttccttcctgtccccttggggctgggggcgggggagagaaccagcatttagcatctgtcaggctgctccagttcctttggggcaatgatggccagtccaggagggtttgtgggctccaaacaaccttgggagcagaacatgatatgaacaagcctttcagacttctccttcctgcaggtcagctggctatgcatgcccagcctctgggcctctttcaggcaggccaggcttgggaaaaagaaggccaattaggaaaggttttttgcacaaaggaggatatgttctcatttttattttaaatcagctttatgatatagcgaaaacttagagttagctttgcccatcatcccatcgtcctaaagcaacacctgtttcccttcttcccttttctggtgatggtttggggtgtgcatttggaagggggaactatctgggttcagccataaagagcattgagaaggaataggggtaagacccctggcctacgggtagaggccagtgactgagactctcattgcgggagggggcgattagtcgcaaagccgcccattccaggatttggagatgcagctccagcacacccttctttctctgtctgcccttagcctctccaggatctcctaacggaggccccttggtgggtcgggagcctctaccgaccactagtgggaagggcacgaagatcttgctatacagagtaggactgggaggggacagcgcgtagtcgcagagtcagggaggggacctcaccacctgtctcctccctgaggtcttagaacagatacaagaaattccaggcgaaggtcccacaggtgagcgtgtgcctgcgagagccgtggccgctgcatagggagggccccgcggagtggggcggcagctgtgggagctgtaggtgtccccattagcccgggagtctccgcccccggaggaacctgggccttgcgggtgagagtcccgagcgaacgcgtcagcccgggtgtgctctctacggtccaggggggccagggccttcttcgggtgggcccgccgcccctcccgcaggccgcacgccgctcctccggggtcgcagggctcagttaagagccggggaggggagaggctgggcgagctctccctccgcaccgtcccgctgggctccagggcaggggggtgtcccggagtcgtccccggctccgcccccgaggccccgccccgcgcccgcctccccggcagcccctcgagcgaagccagccacggacggccagtcgcggcccggagctgcggagctcggatcttctcccccgtctggcccgctctcgacccgcgcgctctgctgggccatggagccggcccccgacgcccaggaggcgcgcactgtgcgcgaggcgctgggccgctacgaggcggcgctggagggtgcggtgcgcgcgctgcacgaggacatgcgggggctgcagcgcggcgtggagcggcgagtggcagaggcgatgcgcctggccggccccctggcgcgcacggtggccgacctgcagcgggacaaccagcggctgcaggcgcagctcgagcgcctgacgcgccaggtggaggcgctgggcttggccagcgggatgtccccggtgcccggcactcccggcacgcccagccccccgcccgcgcccggggttcccgaccgcgcgccccgcctgggcagcgcacgcttcgccagccacgccaccttctcgctgtccggccgcggccaggtgagcccgggggagcgcgtgcgctggcgccagggagtggggctccgaaccgggtgccgccccttcgccccgactgcctgcctctgctcgcgtctgcggggttggggccttcaccggccgctcggactaggtgatgggggtcctgccgcccctccggagttggagagggcggggggaggaccgctgagcctgccagctgcacctgtcttggtcctccgccctgttttagagccaggctctgtttgctcagagtcctgtctccctctctcctctgtcccatgacatcaacggcttgggcgccgaagtccggcccctgactgttcagcactgcctggagccacgcggggcatgttggaatggtcgacacccctgcctgacccccaccctccattcacgctcccctgcgttgccgcttcactgaggcctgacggctctggttattgattaactcagattgagaactcaggcccctggatgggtggggaggggggtcgagggggacgcgatcagcagcggcttttgggaactctccatcgcagggggtaaatcccttaccgtgaagggagagaggtggaaacccgccttgagccgtgtctagattcctcgggtcagtgactagccagaggcccacaccacgtggggatagggcggaggccgacgtggaccagtcactaccttgcgcatgggccacccagagcagttagaatgtgtccatggtgtgtgcagtggcccttgggtgggattttccatcctgatcaggcatgtgctctcgggttgggttcccaggatctggggctgtgtagcctgcacctgctccctccttggtgcaatccctggggctctcagatttcccgctgtgggctgggctggaccctagggggcctggaggagggtatcagattgggccttccccctggaggtcccatccagggtgggagatggccccagaccaagtttgggcagccagagatgttttgctccaaacacagtagttagccccttctcagtgggtatctcagcaaggctttgtgctgggggcctggggcttgctgctactggtgcagatgagggtggggtgggggctgtgcaggaagcctcagaaaggctgaaagtactcactggtgagtgcagcctcgaggtatgcgagtggagtgggcagtggcgaatgcccctagtgtgctgggcagaggagttgggctttgcccggcctgtaagaagttcttaaacatgtcatggtagcagaacccgggagtgtcccagtgctccgtgtgaaatgtctggaaatgtggatacacttaagtctgtcttatgaacatgacactctacgtgaccatggtctaaaatcaccactgtgagctcacacgtgcctcatcaactgtgtcatcggttgtttctgaggttttatttgaacatgcatttgctatttgtctgctcatagcagcagctgtccaaattaaaaaaaaaaatgtcaggttcacatatacatgtagatgtgtgtgtacacacaaagagagagagagagagagagagagagagggaattctctccagtcgtgatttttgtcaatggagattagccattgttcactggcaccaagctagtccactaggttaggagttggtggatgaagctcaggatgagggtcttctttgtgtctggcaagccctcttcggggtggatggaaggtggagggtggctggaggtgggtaacttgattgtgatggtccaaggagaaaggaaaggtctgagctgggccgtgggccttggtgtgtagaggggctgccttggacagggtttcagagggggaatgagcagatggggtagtctcagaggggagctctgacttgggggactgctgggtcacagatctggggtgagatgctgggttccacccgggtcgtgctgaacatgaggggactatgggaactccaggtgaagctgtcccagagcaggtggattcatggatctggtgctccacacagtgagcaagcctggagattagggagctctctgggcagaagcaaagagtctgaaggaattaaaaaccagaccggggaactgccagggagtgaggaggacctgagtgcactctcagcaaaccagagaaggagccctcctggaagaagaggctggggtcagtgaagatgcgtcggcctgttggggagtgaagatggagacccaggcacccaggggcatgagcagcaagggtagctgagcactgtgggtggaacatggctatggtccccagttgggttagaggctctgcaccccttgagccctggctcccggggcctgaggcagctgccgctgggctgacccccgaagcaccaatccccatctctcttgctgtcctccgtctcaggagcattgtcacagcctccagaccagtgtccagcattgagaggagggactgtgtggagccatccccatgtgctggctcgtgtcctgtgaccagcacgatgtgatcaagagcttggtcacactcaaggagccggggctcagggtgagactggagtgtggaccatggacatagagtcacagccccacaccaggctgctgggtgtctgacctctcagactttgtgtctgtgtagtgggggtctgggtgggacaatctcatcccatccacatgagccagggatggctgtactacctggcattgtagaggttggtgtcacactacccctctgtaacaagcaatgacatttagagacccagttcctttcaaactggggactgaaggattggaggtagattgtctccaatatataaatgtcccctgaactcaatacaggaagggttgatcaagtaatcctgtctggctgggagcagggagctgagagccagcttggggccgggggtggatggtggcagcttgaggccaggcccaggccccagcaggttgggccagagctgtggcctggaaatgtcatcctcagctgagctggagccactgggtccctatgcccgaggcagcggaggccccaggaacagctgccaggagccccatgtcagaggcccgaccatgaaagaagccagactcgccttatctgccttcctttcccagacacactgtgcgataagagagttaaatgctttagggagaagtttgaattaagtcctttcaaacggtgttgtgagtggaggagggccgggtcagcagtgtgaactgtcttaggatggggctctggccctgcgtgggtctcgtccccatggatgggcccgtgcagatcaggcagcacccagaaggcctgaaatattcttccttcccctacaaaaatgtctaaaagcttttccaataagaaggtccctgaaatcagacttacctcatcacccttccgcctttcccgtgagtgcctcaggcctgggctccctcatggggcacctcccctttctcaaaacaaagccgagctggggaatcttggggggtaccaggccagctcaacaggacctgtccccagccccagggctctccagcgatttctgccccggtcccagcataccgaggcccctccctggtttccttccgcatgacggcgacaggctgcccccatcaaaggagagcagtaacccactggggactctgcggggacagctcgttccagcccagccctttggttgaagacctctgagttctgtgaaggtcccactgggtggtgaccccagtcccccgccttttcctcacactcattggctaagacagatcccatggggccggggctcatactgacccaggtcctggaagacaactttgccttgagttgtcctctctgccccctagaaggccagagcactttgtggacagagccctggtttggggtgggagacccgagtcccgtactttggctctgccactacctttagtcatggtgtggggtttaggggttccccctgccccaccccacgtcttgctttccccatctgtgtgatgatgggttggaggatggtctcagaatagccccttgcgccttgacctaaggcacgggcagacccctttccccaggtgacgaatgcttctagtcgtggggcaggggagcttgggagtctgggctcagccctacaccccagcctgcattagcccagccccttcccctcctccctttgccggagaacccttagcagtgatctaaccaggatagaacttactcccagtctggtgtagcgcctggtcccctggggcatcatgggggttgttgaggggctgcaacgtgcagggacaggcatctgcggagggcctcccacccacctatagagaaacatatttcctgggaaaatggtttcaccctcagcctttccccccagagccccgcctggacctgtggaacctgtcagacgagagcagggtgggtgagggggcacggagaccccagagcctggtgactgtgggggccggggttccagctggactggctggttctcctccccctgccgacatggtctacacggccgcagcgtggctctaggggcacccgttctgctctgcgtgctgggagacgccctgtgcttttcttgcgtttctgagagtgggcctggcctctcctcctcccactcttgaatcaagagctcaggggtcgcctcctctccaaggctggctcttcccaggctctgggtcctgtctgctgtgagctccccagtggtcccgctctgcagatgctcccctcacctttctcaccctatgaatgtggtcttgcctcttccttctggaaaaacccctcagaccctttcccctggcttcgctcagggctaaagttactgcgctgtcttcatttctctgggacccctctgctaggccatctcctgtcccccaaccccctgtcccccgccccacgcttctgatcacccatgacctcttcttttgctgaacccaatggatgcctggttggatttcctcttcaccttttcctca[145 bp omitted]ctcctgggtttaagcgattctcatgcctcagcctcctgagtagctgggattacaggcacccaccaccatgcctggctaattgttgtatttttagtaga[132 bp omitted]ctcccttccttcctggccttggctttctcaccattcttcaggggctcctcctacgtctctggctgctcctcattctccgcagactgctctgttgcttcctgaaatgtgggggcctcatcccagggcccctaagctgctcttcctctgctgggcttccaggagcccagtgcatgcccctgactcctgtttttccatgttcgtccttcttttctcttaaactccagactcaaaaatccagctacctcctcagctccctgatgctccaggtgccccaggccctcaacatgtcccaactgaaaccctcatttagcccctaaacctgccctgacccaccaagtctgggcttgggagaggcttggcacccttcctcttccatgtccacccagtctcccagccagatcccttttccccaaagctccgagtccttcttgcccgtggccctcccagtgccccatctcccctccccaggttcctgcccaggactagtgaagtgtcttgccatctggtctccactctctggcatcttctgaagggtgtgcctgaaacacagagccgaggaccttgggctccttcttgtctaaggcgtcaagtacccagggccagcagcttgggcggcagggcaggcagcttgggcggcagggcacttctccatctgcctgcgtcctggacgggcatgatcaggatacctgtgccttgatgtctctctgcaaaagcagacactaatcactctgctgggagtgccctcccttgctcctccaccgggctcactctggatgtggctcaggcacccctgcctctgagaagccctccttgccccactgggtcagatgaagcctgtgtgaggcatccttatcctgacacggccccctctgttcaccagcctggctcccctcccagactgattccccaatggcagggtggcacctcccgcactggttgcaagaggagctgagccatctggggccagggatgcaacatcatttgcctgggaaccttgtagaccagggggcatctgggagaggcacagccgacctctcaagccgctcgtcctgggctcgtggtggagcccccaccagccccacagacactctcagccgttcacacgccctggctgtgaggagggcaggaccaaggttgaggacttctcccctggccacacgtgccagctgttttttgctgtataactttgggcagggcacatgccctctgggagtcctcgggccccatctctgaaatggctctggcagcacctaccggggaggacagttgctataagtggtgtttagaaggtgttgctataaggatagcaccggaaaaagggctggatgtttggtagatgccgagtggcacttgcctagcctgctcccgtttctcaaacagggaaacagacccagaggggaactgatgtggcccaggtcacatgggtgggtggcagcacagcctggatcccaggctccccactggctcttggccttggctgtcttgtctgcccccacctgccccacccactactactgcccagctgggatggatgagtcgcacggagctgatcaggcgcttgcactctgcatagccgggtaaatcttgtgtccccgcctcccatgcaaagatctcatcgtgatcagggctccgtagctcatcgttggcccagaaggacctggtgccactggttcctgctgcccctgcacgggtagccatgccgacctggcccagctgagaggggcagggggcgaggcactcctgaccccatcatctggtccagcctgggggaaaaggtgagggggcctaatgtcattggaaccctccatcttgacttctgtcctcagctttttgggactctgggaggagcccagtggaggtgtttgcctcccaggatcgcaggggctcagcagttggagtggggccatcccagcttttgctgtgtgacttggcccgtcactttcttcctgggggctgttttctctcaacatgattggtgttttgccagaacgggaggggatttgggggtgggcagcttttgggggtgggcagctggccctagctgatggggtctcggtgacatttgtgtctctgtagagtttggatcacgatgaggccagtgagtcggagatgagaaagacctcaaactcctgcatcatggaaaatgggcaccagccgggggcaggtagggctgacggcagaggaggggtggctgggtaggtttgggggttaagtaaggccttggtcaggtatctgtgccaggctggcccttggcctggcatcggggggactctatcctgaaccccagcagggagagaggctgccaggagagcagcgtcattcagtagaacttgtgaaacacagagggaagttgggagatctcaggaggtagtgagctctcctgtttctagaggaaagcaaatagaggctgaggagccgactagtatttattaagctggccatgaggggaagttgggaaaaatcaattctggttggagcagtaagatatccctggtaggggaggtcagagaggctggagcagtcagggaggccttcctagaggaggtgggaggagggcccagggaggctagagccctcctgggaggtcccaggcccctgtggctgccacagctgaccacccacccatgctggtcacatgttccaggtccaggcgatggaccccctgagattgcccaaaacttctcagcaccagatccccccaggcctcgtcctgtgagcctctccttgcggctgccccaccagccagtcacggccatcacccgagtctctgacaggttctctggggagacctcagctgcggctctatcacccatgtctgctgccaccctggggggcctcaacccaagccccagcgaggtcatcacgccctggactcccagtcctagcggtatgagctggagagcgtggccttggggcagacctccccttgggatgggagagggaaggccggggctggggagagggagtcggtgggtgacatggaaaacgaggggctaagcccagccctgcctctgcctgccatgtcagccccttcccttagcccatcctcccgggctactgcccagagatgctgtgaaatagcgtcatcccctggtgggggcgaccgtggcttttattacagttggaaggtggcctcttgccctgcacgttgggcactgtcccctccctcaaggccccaggcctgacttgggcctgtggccagtcctccgtggtatgtcctgggggaagccgtgtgggcctctatagggagggtttgggagcagtgttcactggatacatggcacgggccctgggctctgtgctctcaagagcagggcggggacagttgaaaagacctctttgatgttgttgctgtgtgtgcccatcctcctttctcctccactgtctgctgaggcagggccagcttagcccagaaggttagctcatccatgcagcgatgccgggtaaatgaggcagggctgggtcagaggaagggaggctatggcgggccctccctggggccagggtttgttacttctctccctctctcttccacagagaagaattcctctttcacgtggtctgtgccaagctctggctatggggcagtgacagcaagcaaacacagcaataggtgagtcagggcctgtgttcctgtggggtcgctgcgccccaggtgtcttctctgctttggacgcaggccgcccagggttggccctggggttggtgcctcctggtaaggctcggggctggatctcgggagcactgggcggcaggatggggggaaggtctgagcagggggagtgaggcagtgggcctcggtggagagtttcatttggagaaatatggtcacagcctggtttctttgtgggaccttcaagtcagtcaaaagattggaggagtggccgggcgcggtggctcacacctgtaatcccagcactttgggaggttgaggtgggtggatcacctgaggtcaagagttcgagaccagactggccaacatggcaaaacgctgtctccactaaaaatacaaaaattagctgggcatggtggtgggtgcctgtaatcccagctacttgggacgctgaggcaggagaatcgcttgaactcgggaagcggagtttgcagtgagccaagatggtgccactgctctccagcctaggtaacagagtgagactctatctacaaaaaataaataaataaataaataaataaatgaataaaaaacaaaaaaatattggaggaggcctctcagccggcaggagggagaggacaggagctttgtcttcttccatcccagccagctggggtccctcagagcccggaacttcctgcccacgggctgcgagcaggggcaggtgagcaggtccttccctgtggcacaggcctccccccagccagccagcgggactgtgattggggatgggggtagggtagcaggcttggcttttttttttttctttaataataaaaggagaattgtgactttctggcaaaccgttctggggaaaacaaagggggtcttatcgcatggtggtggaggcaggaggcctggtccctccggggctggttctgagcacacctcctgcctgaggagggggtccctctgtcctccccaggcattgacacctgcaaaggggtggttatgtccagatcgggcccagcgtctcctgagttgagcctattggccagtccctccagccagcacaattcagaaaacctgtcaaaccagctagggaccggagcaagggggcctcttctctgagcgcccatcacggtgcaggctgccttgtccacactcagtgcaatggagaccttggggcctggtgagctagtgatggctgctgggcccaggtcccaactcggcgattctttcctcagcccaccgctggtgacaccaccccagtcgcccgtgtccccgcagccgccagccataactcaggtccatcggcagggggagcgtcgcagggagctggtgaggtcgcagacgctgccccgcacctcggaggcgcaggcccggaaagcattgtttgagaagtgggagcaggaaacggcggccggcaagtacggatgcccactcacagacaggcccggccccacggtgtgcccagacccagacggggcttgggtgggtgcagcagggcaaggttcagccctgtcctgttccccagggcgctgttgcccaggacaagatctcttgggcaaggcacaaagttagggctgggccacagggcagcttggggggacagaggaccccagttgttgggggagatggctgtgaggcagggagccaggaaggcttggtgagagcccctctctcctcctccattcccgaggccccctgtcctgtctctggtgccgccaggctgccctcacacccacattccccaggggttgtggctcctctggtttctgggcatgaccggggactggatggggactgggattcctggccagagctgggagccccagcatggggttggtcttgcccaaggaccgaaggtgatgccacggggccgagtggcctccagcctgctactaggtctcgagcgacggctcctcaggctccagcccacctttgcatattcagccagtcctcgtgtcagtgcatggtattgatgcctgctgtgtgcagagtgtggcccaagcgtggtattgatgtctgctgtgtgcagggtgtggcccaagcgtggtattgatgtctgctgtgtgcagggtgtggcccacgcgtggtattgatgcctgctgtgtgcagggtgtggcccaagcgtggtattgatgtctgctgtgtgcagggtgtggcccacgcgtggtattgatgcctgctgtgtgcagggtgtggcccaagcgtggtattgatgtctgctgtgtgcagggtgtggcccaagcgtggtattgatgcctgctgtgtgcagggtgtggcccaagcgtggtattgatgcctgctgtgtgcagagtgtggcccaagcgtggtattgatgcctgctgtgtgcagggtgtggcccaggccttgtgggataatgaagacgacagccagtccctgctcgactctagtgagggggaccgaccccggacatctccccactggccccaaacaacctggcctaggccattagggactgtccttggggcccagaagaggaactcatccctcctggctaggaaagagccatcagggaaggaggcaccccattaagaggggagctcagaaggaggagtgggaggaaggagctgggaaaggtgttccaaagcagaaggcaggggcccagggccatgtgagccaaggtcttctgtctcaggattcccaggtgacccctgcttcctggatggggaataaacaggggacctggagggctgtaggggtgtggacggtcctgccacataccatcaaaggaggctgtgtcgctggtacatgggctgtgccgtggacgtgggcacagctgagcccacgtgtgccaccagcatctcccctgggtgagcagagcaggtgggagcaccctccttggtggtgccaggacagcctcccctgccccagacccgcactgggagatggcagctggaggggcccccgcagcaggcctgccgtctctccgcagggggaaaggcgaggcccgggccaggctgaagcggtcgcagagcttcggcgtggccagcgccagcagcatcaagcagatcctgctcgagtggtgccgcagcaagacgctgggctaccaggtgagccccggctcccctccggctgctgggacgccccagctaaaagcttgaccaagcgtcgcccctgtccttgttctcccgcctgggcaggagcccgctgaggctggggttaaggggtaggaaccacggtaattatgccttccgagtgggtgcccagctgccctcccgcactgaccccactcaccctgttgcagcacgtggacctgcagaacttctcctccagctggagcgacggcatggccttctgcgccctggtacactccttcttccccgatgcctttgactacaactccctgagccccacgcagaggcagaagaacttcgagctggctttcaccatggccgagtgagtatggtggctcctgctggctaccagccccagcccagtccctgagcccaacttcttccccaggtggggcatgggggcgagtgggatgtcgggccgctgtctgcaaagctgaaggaccctggggccatgtggtctgtgtacctcttgtgcagatgggaagactgaggcctggagagggattttcccagagtcacacagcactcagtggtggagggggactccgttcctggggacctgccctttttgctaggtgcccagcttctgaggtgcactctgggagaccagccacagaccaggcatgaagggcagcaggacagggtcccccaaagctctgaatctgtcctctctggactgatggagagatgccgttgcttgcatgagccacagctgccagttagcaaggaactggatatgacctgggccacttaaaaggagatttttgcttccaataagattttccttcccgaaatggtgttctggcatttattgtgaaattgcctagcttcttaggtcccacctctagggtgaagatttgggggtggctctggggtcaggaggcacctggaaagccagttcgggatttggtttttggccgagggcctcaggagagttggcaaagtcaggtctgtctgccagggctccagcggcggacgggggcacagtcaagaactgggcgaggagagtttaataaagggaccctttacaaaggcgtgggcaggaatgaggtcgtgggtcaggcctcatgcagcagcctcgggataacagcagtgtggcggatctcagcccgtggcctgggtgcggaggactgtctgataagagctgcgctttgggcaaatggttgcagtcagctcgctgcgacctggcagggagggagctgtggataagtgtcccaacctcattcccctcctgcctcacgccagggcctcatggtgactgaacccaatctgaagacagagggccagggctgtggttcatcctggcccccagggcagggagcagggcacagatgagtggtgttcggggctgcccaatgctaagctctctgaagctcagagagaagtaaggccgtccccaaagccgagtcttctggagggcgcgtttgttattctctccctgcctttgtgccttgtgttgtcagcctctgacgtcggtctacaaccgaccttgtttgtttctggtctgagtcctcagtgcccacatttaagagtggtccttggccgggcacggtggctcccacctgtaatcctagcactttgggaggccaaggcgggtggattgcctgagctcaggagttcgagaccagcttgggcaacacggcgaaaccctgtctctactaaaatacaaaaaattagccaggcatggtggcaggcgcctggagtcccagctactcaggaggctgaggcaggagaattgttagaacccaagagaaagaggttgcagtgagctgagatcgcaccactgtactccagcctgggtggcagagtgagacgccatctctaaaaaaaaaaaaaaagtggtcctcatgggcttgttgggttaaaggagcctcaccccaggcctcacctgccttcctcattcctttcccagcccaaccaccaaccacctggccccggccccagccccggccctggcccaccaccccggcccctgagcctggccagggaaagaatcagagccagagggtcttgtaacctgcacttggtattgtaagtctcgctttgacctgagatagctgcccctctctggggcagcaactctctctccgagggcagaatcgagactggctctgagctccttagcctgagtttttggaatatcggtatcagccctgttatgttgccttggatgacgcgcttggactcagccccctggggtcacaagaactccttgtatactttaaaagcctttctgtcttggctgcttggggttagctgtcatcctaattgcagaaacagctctggacgagcgtgttgtgcaactggatccagacgatggtgtggtggagccaaggggaatgggtggtgcagggagcgggcagctcatgaggatggggcccagctgccgaagcccagacgtggcaaccgtcaatcagactgtcagaggacacagggtcagggtatcggggtggataccccagcacccaccccagcggcaaggtcactccagcacccactccagcggcgaggtcacccccacacccaccccagggtgaggcgacactgtcttgcaggattcttccttgtctaagtccagtgatgcccgcttatgccctggtcaccttggtcaccctctgccctagaccaggctaggctgtggcagggagagggatgccccgggccatggggtggtggccccatgccccagcctgcagggaacacagctccccttggcagccagaaccagagcgattccgggctgtgcttccccagcacgaggtttgagttcagggagcttctagactccaaacagatgtttcttctattcccagcttggtggggtgatggggaggcagcggcggaggctggtccaggttttgccttctgccttcccggagcacacagcagggtaaaaacgtgggccccgcctcccggtggcctgggcctgctccagctgtggagggggcagggaggatgggtctgatgaagccgctgagatgagttcttgcttttctgctgactcgagggcgtggggaggggcgtccaccgcaggcctgtgccggggggtcgggggagtttgctcagagcctgggaagaggcctcccctcatgactcatccgtaagattatctcccaggtactagggggagagggctgggaagactggctcgcctgcctggggcctctggggaggacgacagcttggatcacctcatttgttggacaataggctggttagaagagctggcaggaaagcgcagggacacctgcctgagggtactagctgtcagtgtcctcaccgatgttcctgaggtttgcggcaaaggctgagcagatccagggtcgtgcaggcagcaggaccacagagctaagaaaggcagcctgggggcaggcagggtgggatgagaggagcctggggtctgacaagacaacttctggaagggaaaggaggacacaggtccccaaaccacgggttcaccttgcgtgaggaatgaagcatttccccgagcaagtgccttaaaggcacaaggatcaaggatgcaccagggacctttggagtaaaagtggtgtgtgctgcccttccccaacccccacctgataatttatggtcccagagattcccggtggcctaatctgtgtgaatgatgcagtgttgacagcacagcgagcttcccttgcctgacaggtgttcagggtctggaacgagggaggaccggccccttttatggaaggggctgagtcgggcgggcgcctgacccttctgcacccgtcctttccacctctgcagaggcccagtgcaggacgtgcagccccaggcttcccgcttgccctgcggggaatgtgtcctgctctcgggttacgctggagcagaagggccttccaggctatttgtagtgcccatgtgtctctgtctaaaaccagataggaggcagtagtcccagtcctggcatcctggtctgcatttagagcaggcttaaaaaaataaaaataacccccaagcccatcctccagctcccttacaggacagccctgtggtagctgaagctcacaatagacaggagtaggagaaaaccctttcagccttttccccaccccactgatgcggggcgtaagcaaagacactttaaaaatggtcgtcgggattggccgcgcacagtggctcatgcctgcgatccaatcccaggactttgggaggccaaggcaggtggattgcttgagcttaggagtttgagaccaggttgggcaacgtggcaagacctcacctttacagaaaatacaaaaaattatcttggtgtggtggtgcacacctgtggtcccagctacttgggaggctgaagtgggaggatcgtttgagcccggatggcagagattgcagtgaacccagatggtgccactgcactccagcctgggcaacagagtgagacctcatctcaaaaaaaaaaatgtagtcagcccatgttaactctggttcttgctatggaatggcatttaaagtgatttttactttctcctttgaactttctgtttgaatgattgattgattgattgattgattgattgacacaagatcacactttgtctcccaggctggaatacagtggtgcaatcacagctcactgtagcctcagactcccaagctcaagtgatcctcctgcctcggcctcccaagtagctgggactacaggcacacacccccacacttggctatttttttttttttagagacggggtctaactatgttggccaggctggtctcaaactcctggcctcaagtgatcctcccgtctcagcctcccaaagtgctgggattacaggcatgaaccaccgcacttggcctgtttgaatcattaaaacaaacctgtatcatttttacaaaagcagttgttgttttttttttaatttaaaaggcaattgggacctctaatatttggagactcaaacattttttataaatgtcaatgctgatcatcactttctttttctgctgtctcccgagttttgtccagcctatgtctgcagcttccaggaatcttgccatcataggtcaaatatcccttatccaaaatggcctgggaccagaagtgttttggattttagattttggaatatttgcattatataatacttaccggttgagcatcccaaatttaaaaaatccaaaggctcaaaaatctgaaactttttgagtgccagacacaatgctgaaaggaaatgctcattggcgcattttggattcggtatgatgaacctgtgccattgaagctggcaccatgtctctgagggagagtgctccctttgcagggacaatctggggtggaaggcaggtgcttttttttttttttttttttttttttttgagatggagtttcgttcttgttgcccaggctggagtgcagtggaataatctcagctcactgcaacttccacctcctggattcaagcgattctcctgcctcagcctcccgagtagctgggattacaggcatgcgccaccatgcccagctaatttttgtatttctagtagagatggggtttcaccatgttggccaggctggtcttgaactcctgacctcaggtgatcctctcgcctcagcctcccaaagtgctgggattacaggcttgagccacggcacctagctaatttttgtatttttagtagagacggggttttgccatgttgcccaggctggtcacgaactcctgacctcaggtgatccgtggaaggtgggtgcccttgaaggtctgctgtgagctgtgcttcaaagacagagaatgctctctgcctgtgggaggcggaatttggagctccccaggaaaagaagtgggtgaagagcaaaggtggcaggtgaagaaaagagggagccaggagacggtggttgcgtgttgcatattgtgacccctccctgctcccctaggaacccctacactctcatgtactcaacttagaaataacaacagtggggaccatatggatcatggcccagtgccctggttgcctgctggggaagccggcgatctggacagcggaggatgacacagggcatggcatccactcccatcctgactgccaccctggacttgaagacttgccaccagggcaggggcccaccaggggtcattatcagagggtaaacgcagcctctagaatgaggaggggtcagcttgctgtcttctgcagaggctggacaacacccggaaaatgccggcaattctgagggcctcctatgaagtgggttagggagtggcaagacctggttcggagaggtgggtcctgggtatcctttgtgggaacagttaaggaaccagagctgtttagttcagagaaagacatggaaggaaggttttcttctggcgtgtgaagggttctgacatgggggaaaaatcagactgagaataagtagccttatggggtcagcaggtagaaagtacacacaggcacaaatagcgtaagaaatgttagaagaactttctcgtggtcagagcatctgcagagggttctgagctgtccttggaggaaattgggtcccctttccctggaccctgagatgaacaagctgaggcagggcctttatagaggtgattggtgcttctgacgggggtgtttggatggttggaggtcctagagtcctcatgctgtccctacttaacatgtggcaccactgaggccaccgccgtcagtgctgataaccagagcatgtgtggagcctgtttctacacacctgggatcctccaaatagcaggtgtgggagtggaggtgccccagctgtgtggcaggtggaaaggagggcaccagatatgaaatgatcgctcaggaaggtgaactcaggtccccagcctctctgaactcagattttcttttctttccttttttttccccttgagatagagtctcactctgtcgcccaggctggagtgcagtggcatgatcttggctcactgcaacctccgcctcccgagttcaagtgattctcctgcctc[134 bp omitted]cagcctcttaaaatgttgggatgacaggcatgagccaccgcgcccggcctgaactcagatttttcaatgctttatcatcgacaaagcacctttgcacgcctgctcgcatcagagggccagcttccctgacatcgagccctgccctggcctgtcccagggagaaagggtgcccgctcattgggccaaacccactcatcaccccacaaagcctgttggattcacttacaggccacccgctacaactccaagcaggaggtggggaggggatccaggacagatgcctccatttcgccttgacatttggtttctggtaggaggcctggcgtccagccagcacagcagagcagggcctgcgggtaatgttacagtcttgtctctggagcacacagccgcgtgagtcctggtagaaagtgctgagtgcgtcgtgccaaactgggatgggtcagaggagtcttgctcgctcgctggggtctcccctctggctgggctctctggggaacaagatgcataaagacacattgtggaatcacagcctcacaacaggcccactgggagggacagcagaggtggtattctgatttttttctttttttttgagacagagtctcgctctgtcagcaggctggagtgcagtagcacgatctcggctcactgcaacctccacctcctgggttcaagcgattctccagcctcagtctcccaagtagctgggatttcaggcgtgcaccaccatgcctggctaattttgtgtttttagtagagacagggtttcaccatgttggtcaggctggtttggaactcctggcctcaggcaatctgcccgcctcggcttcctaaagtgccgggattacaggtgtgagccaccgtgcccggccagtattccgattttgtgctaaggaaatgggcacagaacagtgaagcaatgggaggagtcggggtttgaactctactgttttgatctcacattcaggcctcttctctgtgatccaccctgcttcttaaagcaaggcatgatcgtcaaaatggcaacaagaataatctctgacttttttgtttggttttttttttttttttttttttttttgaggcagggtctggctctgtaccccaggctggagtgcagtggtgcaatctgggctcactggagcctccacctcctggcctcaagcgatcctctcacctcagccttgagtagctgcgactacaggtgcacaccaccatgcctggctaatttttaaaactttttatagagacggggttttgctgtgttgtccaggctggtctcaaactcccaggctcaagtgatcctcctgcctcggccttccaaagtgctgggatgacaggcatgagccactgtgcccggcctcatctttaacatttattagctctttcaatgtgccctttgctgttccacctgatttgcatgggtttataattttcataccactctttcgaggtggatataattcacagatggagaaactgaagcccggagaaatgaagtgtgttgcccacagatatatagctcggaagagatggagctgggatttcaaccctgacagccatgcgcttattgatgggaaaaaaaatagactggagacccctggaactacaaaagtacacacagctgctgaaggaagggcactgacaatcgggccaagtgcgatcgtttttgcctttttggttctgcctgataatgtcaggccggctccatctggtgcccaggggacccaggcatactgtaagcagagtcagaggaggcagggggcgcagggctgggcattccagaggctgtctgttgttatttcaggactcgctgctgagatgagcagggcgatgcgtcttgactgttgacgttcctcctcccacgtccacgaggccttcagcctccctctgagccccagtgaaaggccacagtgtacacacgagtctaaaccagtgagccaaaagtgaaaccagtatttcccagggcaggaggcagagggccctggggggctgggggtggggcagcaatgagtttaagcaatctctttttttttttgagacggagtctttcttgctctgcccccaggctggagtgcaatcgcacgatctcggctcactgcaacctctgcctcctgggttcaagcaattctcctgcctcagcctcccgagtagctgggactacaggcacacgccaccacgcccggctaatttttgtatttttagtagagacaaggtttc[132 bp omitted]tttcacttcaaatttaaatacaatatgccaggtactgtgggtcgcctgtgcctgtaatcacagctactcaggaggctgaggtgggaagatcgcttgaggcaggcgttcaagaccagtctgggtaacatagtgagaccccatctctacaaaactatttttaaaaaactagctgggccgggcgtggtgtctcacgcctgtaatcacagcactttgggaggccaaggcaggtggatcacctgaggtcaggagatcgagaccagcctggccaacatggtgaaaccttgtctctactaaaaatacaaaaaaaaaattagccaggcgtggtggcagacacctgtaatcccagctactcgggaggctgagacaggagaatcactcgaacccgggaggcagaggttgcagtgagccaagattgtgccactgcgctccagcctgggcaacaagagcaaaactctgtctcaaaaacaaaacaaaaaaacaaacaactagctgggcatggtggtgtgtgcctggaatcacagctacttgggaagacaaggcgtgaggatcacttgggcctaggagatcgaggctgcaataagctaggatcgtgcctctgtactcatgcctgggcaacagagcaagcccctgtctctaaaaaaaaaacccaaattaaataaagtaagtctgtttaaatgaaaacatgaattgtacaggtggctcataaatctgggagtttgggaaacattgtattggagtcagtgactccaagggttctgccagggttatctgaattccccgctggtgggtccttgggaacctctggctgccggctgagctctgttcccgggaccgagacaccggccctgtcgcggctgtggggctggctgatggctgggaccaccgttctgacggggcttgtgtgtttcaggaatctggccaactgtgagcgcctcatcgaagtggaggacatgatggtgatgggccgcaagccggaccccatgtgtgtcttcacctacgtccagtcgctgtacaaccacctgcgtcgcttcgagtaaagcccctgagcctggattgccaaagagcagccccaggaagaggccgggggtccgcttgcgattccccagccaggatgcccccaggagccttgccgtttggtgtgagcgcgctgtttgttctgtggcatgtgacggcactccccttcgagcccagctgtgttactgattaaaagtactgctgagctgtggtccgacagcactgatcacagccaagggcttggaggaaaaggaaaaattatgagagagagagagacattggtgctaagtaatgatcttcctaaagaaatgcttgtgtttatagcttccagaatgctaatctacaattttccctctggtgaattcgatacatcggctttacagggttacagtgattaccaagtgtttttttttatcaaaatacccagagttttttacttcctcacgcgattgtaggttcctctcctccctccctctgggccactgccaggaaacagagagaccgcttaatcagcagcttgacaaagaagacctcaagtcttgggaagaaacagtttaatcactcccaagtcctgggcaacagatgaccttcaagtcacctccgctctccggggagatgggaaggctctcctctcggtcccaaagtcctcctgttcttcccaggaggccccacaagtgtttggctaagcacaggctctcgggaatttaacacttttggggaaggaataggccctttgtgctgagagagagtttttattcacatcttttttaggggatttgctgcagatatttataaaaagtaactccctctgtaccactgacccatttatacataaaaaagatgtgttgaattttgcttggggtttgtcatttctgtttaggagatgggagttctgtgaataagagactttgcacaccttccaagtgaatatccactacattccacccctgttcctgcacttaaatcactggcctggaaagctgaagatggcatttgctgtcatctctgatcatctctgagtgtgcctgtctcccatctccatgttgtggaaggagcgtcaacagaaagttccccttgagatccgtcctctggatgtagaccgcagtgtttgtgataaacagtggcccaagacagcagggtttggggtggtcccgcacttggaggaagcccatcaaggaacgttggtttattttcacagctgtttggtggtaggactttcatagaaaaatcttgagattctatagagctccagccattagcttattctcagccaagaatcattgtataattgggttggattttagccatgcacttctaaaccttccctttaaggagcggatctgtgtcttcacctcatgcagccggctctcaacaccagtgcctgtgtgcctttgtggggtcccacgtgtcccttgggtggtatattggggggtgggcaggagatccctgggggtgtcaggaggaacatggcagagcctgcaggtgggtgagcagtattctccatggattggttggtccaggctgcagtcttgccctctctctcggattctcccactctggaaaccattcccttgctagctctctcgtctcttgtacgcttggggaggtgagacctattattaacaggacacataactgaaggttagggtttcaaacctgaagccaatctgggaacacaagggctctgtaaaaagcatggctatatgttactgagtcctcgcacacgttaaatggagctctcccgagttgcagacatggccgtacgctctgcgcatgaaacagagcagatcctgccagaatgcagaacaatttcttttaaactttaggaatggtgtccctcatgtctcacattcagaatgagacagactcgagtttttaaagttggttccatgatgttcttgtctgtggtctttgttgggggtggggggtgagagatcataagacagtttgtgagtttcaaacatgattttacctctaagacaaagcatgagaagaaaatccaggaaggtctcacaatcctaagatatttggaaaccaccgttttaggtcggggttacgtgaatgttccccatttgtgagacccaatttcatcttgctttctaccctggtatggaggaattcacatcttttttcccctttcccgagagaattatttcttggagctgctcataagagtcttctgtttttccagatagattccttcacctggattttgttaaacttattaagtcggaccaaattggcttgtgtgtttccctgaagtgaacgtttcaccagagccacgatgggttttagcttttctgatagctgatggatatttttcaaggcaagcgagagcctataagcactttctgaatatgacagagcacatgctggtgagaggagaccgcacaggccaggtgtttggggaacagtttgttaaagccaatgaatttcgcaaatgtgctagatgatgaagagttctcagctttcccggttgcagtgatcagaactctgtaactggagaccggtgtgagagaagattttattctctgccatcatgaccgggtctatacgactgcaggcaattgcacagaagactagaaatgctgattcagttggtcagtttggggtgggacatcttaccagtccagcagaaccaactctggcttgggtttttctagctggtgacaggtgaccaactcattctgatgagttgattacgcctgtggacgtggcccacttgatttattttttctccctctgttagctgtgctctcccaaccacctgataaatggacccagtatgattatttctgagccatcttatctctctcacttttaaagcttggattgggtttgcttttagagcttttgatctcttatctcttggttcttggacttgctttgataccaaacagccctcatagtcttttgaaagaacaccttaaaaattcctaggctgggcgcggtggctcatgcctgtagtcctagcactttgggaggccgagacaggacaaatatttgagctctggagtttgagaccagcctgggcaacagagtgagactctgtctctacagaaagttttaaaattagccaggtgtagtgacacatgcttgtagtccccattacttggaaggccaaggcgggaggatggcttgagcctgggaggtcaaggcatcagtgagcgatggttgtgccactgcctggagatagagtgagaccctgtctcaaaaaagaaagaaagaaagaaagaaaaatccctaagacctgacctgcctactccctagaaagcaccaaataaggaaaagcactccggaagaatgaagctaagaaggctgtgctctctgaggcatccgggcagccttcactggagggacaaggtccaggtaggtgggatgacaagctgggaaggggccctgaaccagaggcaggtgatgtgggtggtggcaccagagagacaccagacagtgttaccgtaggtcttgactgtccaccttcattcctgaagttgatccagctttcttactgtcacgtaggtggatataaaatcgatctttagggttctgattttttgtttgtttttgttttttttgagacggagtctcactctgtcacccaggctggagtgcagtggcacaatcttggctcactgcaacctccacctcccaggttcaagcgattctcgtgcctcagcctcctgtgtagctggatgtacaggcgcccgccaccatgccaggctaatttttgtatttttagtacagacggggtttcaccatgttggtcaggctggtctcgaactcctgacctcaagtgatccgcctgccttggcctcccaaagtgctgggattacaggcatgagccactgcgcccggccggggatctgagttttaatcactcccagtgcaagcgtccttatctggtttgcagactgagtggcatttgtgctgccgaggctcttcctggcttgccctcctctctggctgttgctttccctcctctgttcattagagcctcctctcctcggcttgttgctcctatgtgctgtgacctaagctctatgctccttcttctacattagggttcatagcccaggactttggggagtctgtggatgtccaaattgagtgttttacctcaatttggttgaggttgcagtgagccgagattgagccattgcactccagcct[145 bp omitted]aacccccgtctctactaaaaatacaaaaaattagctgggcgtggtggcgggcgcctgtagtcccagctactcaggaggctgag[137 bp omitted]attcttctgtaaagaaagtctttccctccctccaactcagtttttgagtgttcctggaggcccatggatttttttttttaattcaatgtgttgtaatcgcttactgttataattttttttgatgctcaaactgttcagagggagaagacagctcttgtgtctttttgccatattcccatggttctttgagcattttattttcttttacttttttgagacagagtctcactctgttgcccaggctggagtgcagtggcgtgatctcagctcactacaacctccacctcccaggttcaagcgattctcgtgcctcagcctcctgagtagctggaactacaggcataagccaccacgcctggctaatttttatatttttagtagagacggggtttca[143 bp omitted]tgaccttttactttccttgccccaactgtggaatcagtcatttattcagatcctggtctcttgtggtggagaatttttatttcccaatgaaggtccagggacttggtgtgccggttttgctgggtgtcctgcttctaggcccttgcagtgaacagagctaagatgttttagaagagcctgcaagtatactgaaacctccagcttcaattcagcaccacaggcctcatctgtacattagtccctatttttccttttttcaaaccatcctgattcccaacaatttcaatacacttacggatttcttctgtaccgcaatgtccaaattctgaaacagtagtttccgaattcttaaactgatgtcactgccaacaacaaacccaccaagtaaggtttgggatttcccttcagcccctttccccacctttgggtatattccctaagggtgcacagggtgctggattcaaaagttacttgaggctgggcacggtggctcacgcctgtaatcccagcactctgggaggccgaggcaggcggatcacttgaggccaggagttcaagaccagcctggccaacatagcgaaaccctgtctctactaaaaatacaaaaattagccgggcatggtggtacatgcctgtaatcccagctactagggaggctgaggcaggagaattgcttgaaccaggacctgggaggcggaggttgcagtgagccaagaccacgccactgcactccagcacacgaagtgacagagtgagaccctgtttcaaaaaaaaaaaaaaagaaataaaagttacttgaattattttctcttggaaaccatgttatgaatttgatatgcatgaggttgacttgattctgtttgtattcaattaaaggtttgtttccatcatttttattttctttttttgactatgtaaatacttcacctaggtcaaaagtcaaaactctacaaaaaggtatattcccattcccattcctccatctgttcccacccttagtctctgttttctcctccttgcctgtcttctcccttcctccttttctttttaccttccttccacaacaataagcaggtatatatctatcatttcacagagatccttctcgtcctttttttctttttctttttctttttttgagatggagacttgctctggagtgcagtggtgcaatctcagctcactgcaacctccacctcttaggttcaagcgattctcctgcctcagcctcccaagtagctgggaccacagacacccgccaccacgcctggctaatttttgtatttttgatagagacggggtttcaccatgttggccaggctggtctcgaactcctgacctcagatgatccgcctgccttggcctcccagggaagtgctgggattacaggtgtgagccactgcgcccggctgatcctcctcctctttaaaaaagccctgcataggccaggcacggtggctcatgatgcctgtaatcttagcactttgggaggccgaggtgggtggattaactgagctcaggagttcgaaaccactctgggtaacacggtgaaaccccgtctctactaaaatacaaaaaattagctgggtgtggcagtgtgcgcctgtaatcccagctacttgggaggctgagacaggagagtcgcttgaaccctggaggcgaaggttgcagtgagccgagatagcaccattgcactccagcctgggcaacagagcaagactccatctcaaaaaaaaaaatgcctgtatagccctccactgtgctagctgatcacttgttcagcccatctccgaggcagggatatcttgggtttttttccagtattttgctattacaaacaggactgcggtgagcagccttgggtgtatgctgttttgcatttgtgagggtggatcttcagggttagttcccaggattgagattgctgggttcaagggtaaatgcatattttgttagacattgcccaaatctcctctgttttgcagtctcaccagacacatgagaatgcttgcttttccccaacagcgagtgctgtcaggtttttgaatttttaggagacagatggtttcagtgtagtttaaatgtgaatttctcttatgagtgaagatgagcatattttcatgtttacaggagacttgtatatcttgttctaagaactcttctgtctttattcatttttctattttttcacttgattttttcttttaagacaaagtttcgctctcgtcacccaggctggagtgcaatggcacgatcttagctcaccgcaacctccacctcccgggttcaagcaattctcctgcctcagcctcctgagtagctgggattacaggcatgcgccaccacacccggctaattttggtacttttttggtagagacggggtttctccat[137 bp omitted]catgtgtgtgtgtgtcagagtctcactcccattgcccaggctggagtgcagtggcatgatctcggctctcagcctcttcctcctggtttcaagcggttctcctgcctcggcctcccaagtagctgggattacaggtgtgcaccaccacgcccagctaatttttgtattttctgtagagacggggtttcaccatgttggccaagctggtctcaaactcctgacctcaagtgatccgcctgcctcagcctcccaaagtgttgggattgtaggcgtgagccaccacacccagccaataactttttctatattagaaagatttctgggctgggcacagtgactcacatctgtaatctcagcaatttgggaggccaagctgggaggattgcttgagtccaggagttcaagaccagcctgggcaacatagtgagaccccccccatctctataaaaagtttaaaaattagccaagcatagtggtatgcacctgtagtcctagctactctggaggctgaggcagaaggattgcttcagcccgggagggcaaggctgcagtgagctgtaattgcccattgcactccagcctgggtaacaaagtgagaccctgtctcaaaaaaataaataaataaaagatttctgtatctctctatcccagctctctccacccactctgcctgtaacctgacctagctcatgtcacttctcacttggattagaacaactacctcctaaaactggtttccaggcctcactcttgtccttctctaatccattgtccatattggaactagaatgatcttaaaatgcacatctgatcatgtcaccacctccagtgactggattcctgttgtccttgggataagcagtttcttagcggagcactggggaccacctcccctggccgtgtgctctgtcctcttttgccttcacagcttcttttcgaagagctgtatgtggtaacagaacgaggggctttgtgaaattacgctggcagcagaaatgagcagacctggtttcttaggtcagctacattgtctcattgtctaaacaccatttccttggtgaggcttcatcaacatcccaccatcatctctgttcccggggcaccgtgaacttcatcctgtcactcacagctcctgttttatcactagactataagctccctgagggcagagcatgcgcctgcttccctactggatctagcaggtgctccagcagtactttttttttttttttttttttttgagacggagtctcactctgtcgaccaggctggagtgcagtggtgcgatctcagctcactgagatcggcaagctccgcctcccgggttcacaccattctcctgcctcagcctcccaagtagctgggactacaggtgcccgccaccacgcccagctaacttttttgtatttttagtagagacagggtttcacctgttagccaggatgctctcaatctcctgacctcgtgatccgcccgccttggcctcccaaagtgctaggattataggcgtgaaccgccgcacctggcctccatcagtatttcttaatggatggcttgtactgtggagtcgacaggttgtttggtgccaagtaaatacaggaggaatggaatgaaagaatgagtggttcagcccaagctcctcaaggttaagtgcttactttcagaattaatcaggtgccattgaatttctttccagtgggaccttcttactcaagatggcttcaattccaatcaccagagagttttgagaaccagtgggaggggttcctgggcagcggggctctgctcctaccgggatttgtttattcagctgatgttaataaatgaagctgaaggtaacaagctgtcacttagcatctccaggctggaccagaactgccattggttaagtttcagacttcagccccaaagtacagtgtcaccaccttggatgaaggatattaattagtgtcatgagggagatcacagtctcattcccctccgtcactagcacgagactgaaaaaaaaaaagaaaatcaaattcagttagaacagagacgtgctgagaagctgggccagagaccccgcggggaacctgccgttgtttgtcaaaaaacgaggccagcgaggaagaagccaaccatgcctcccgctccactcgctttggaacccacagaatgttcaacagggcagcacctttcagttattaagacactcagattccaccctggtgcagtgaagcaaactggattaaccacgcggcacgtggcagagccacagcgcaaaccacggctcctgctgctgaggaaaatacaggcacctcggccactctgggctgtgggttcgacgtgagcagcctcagggcagagacggattctgttcatgtctgtcccctctgccatcccaggtctcaggggttctgttcacctgaccatggcagagttgttttgcccacctgtgaaaaccactccaaccatcatggttaccattgcattgcatgttggcaaatttggggaacatcaccttccaggccacttacagcactcgaataagggctttgacaaaacacaagcgttattatgaatataataataatcagcgttagttggctgtcctggtggtttctggtctgcagagggttaacaatgatgacaataacgttgcctcccgggctgagtttctcatctgctctatcaggcccaccccctactccggactgattctccacatcccagattcatgtcccccacccccaccacaccaagggcaagagaaaaacccgaagttctgctcagaaccttgtcccctgccccctactcccctcactgcagttttcctgttagccaaggaatttcattccacagatctgtttgcttctttctgttgctttagccagcaggcttaccctgacctgagaagggtgactaaggggaaatggagtattttcagccaggggccatcacagttgctgtatcaagtatcttttccaggcaatggatttcatgataggcgtatctttattcgggaaaattaacacacttaatttagagggatggacttcccttccaggaacgttgcccccctcatctgtcccccatgccacctgccggatcatctacagtgacagcaaccaccatttttatcctggagacaccattaaacctaagccaggaggtctggcttgtagtctgcactccacttttgatgaacacgggaactcacagagccagtttgctcctttgcaatgggcatgagaccgggaggatcggggagggggttactgagcacctgagactcggggagctgcagtggtccttggtgggagatccacaaggtgaactgatcgtgtgaatccgagcactctttggagccagagacaccaaggagaaggcacagaggggaaagg[143 bp omitted]accccgtcttgactaaaaatgcaaaaaaattagccgggcgtggtggcacatgcctataatcccagctactcaggaggctgaggcaggagaatctcttgaacccagaaggcagaggttgcagtgaggtgagatcgcgccattgcactacagcctgggtgacaagagcaaaactccgtcacacacacagacacacaaaaattgcgtttgctatagggatggggctattttttattttttaactttttaaatttttgtgggttttttttttttttttgagatggagttttgctcatgtcacccaggctggagtgcaatggcacaacctaggctcactgcaacctccgcctcccgggttcaagtgattctcctgcctcggtctcccaagtagctgggattacaggcacccacgaccaaacccggctaatttttttgtatttttagtagagatggggtgtc[143 bp omitted]cccagactggagagcagtggttcaatcacagctcactgcagcctcgaactcctggtctcaagcaatcctctcactgtagcctccagagtagctgggattacagatgctcaccaccatgcccagcaaattatttatttttatttatttatttatttattttgagacagagtctcgctctgtcacccaggctggagtgcagtggcacagtctcactgcaagctatgcctcccgggttcacgccattctcctgcctcagcctcctgagtagctgggactacaggcacccccccaccacaccc[159 bp omitted]agatgggatctcactatgttgcccagactgggggcattttttttctctcatttttaaaaattttgagttaaaaaaaactttttttttttacataaaagatatatggaacacttcatgaattcacgtatcacctttgctcaggggctgtgctaatctcggcatcattccaattctagcatatgtgctgctgaagtgagcactattctatcatttttaacatcaattttatagaaatgaaatttacatccttttaaaacagttattttaccaagtaatacatgtacacaaattaaaaagtcaaatggaggccagggacagtggctcatgcctgtaatcccagcactttgggaagctgagaggggaggatcacctgaggtcaggagttggagaccagcctggccagcagggtgaaacaccatctctactgaaaacacaaaaattagccgggcgtggtggcgtgggcctgtggtcccagctactcaggagacggaggcatgacaatcgcttgaaccctggaggtggaagttgcagagagctgagattgcactactgcactccagcctgggcaacagagtgagaccccgtctcaaaaaaaaaaaaaaagtcaaatggtactaaaagccatattgaaaaacactggctgggtgcggtggctgatgcctgtaatcccagcactttgggaggccaaggcgggcggatcacaaggtcaggagttcgagaccagcctggccaatatggtgaaacccccacgtctactaaaaatacaaaaattagctgagcgtggtggggggtgcctgtagtcccagctactcgggaggctgaggcaggaaaatagcttgaacctgggagacggaggttgcagtgagcctaggtcgtgccactgcattccagcctgggcaacagagcgagactctgtcaaaaaaaaaagaagagaaagaaagaaagagagagagagagagggagggaggcagggagggaagaaagagagagagaaagaaagaaagaaaagaaagaaagagaaagaaaaagagagagaaagaacaaagaaagaaaagaaagagaaaaaagaaagaaagaaggaaggagagagaaagagagaaaggaaagaaagaaagaaagaagaaagagaaagaaataaaaaagaaagaaagaaggaaggaaggaaggagagagaaagaaagagagaaagaaagaaaagaaagcaagaaagaagaaagaaagaaaaacactaacccccttcccccaccatcccgctcaccccgtcttactcctgggaaggaaccatccttatctcttctatgtatttcgctttgtatttctccccagatttctgacattgtcctactcttctttcttgatcctttctttgtaggtgcccattgatttcccactgtgggggctgggaactgggccctgtcccactgtgaccccatcacttcctctgctcagtcctcccacaatgtggtcatatcacaactttggttaaattgatagtgtttttattttaatcactatgcaaataatattcaactcaaaatgttcctcaactcttacggtctccccaaaacctgcagaggtggttttaaaacatatctgcagattctcggactctcctctcatcaagacagggaatctgattccctcccgccttgcacatggtggctgaactctaaggaacacagtgccgctgaagtgacgctgtgttgcttctgacgcaggtctcacagcacgatacaacttccctctcattttaggacctgagcctttggagccctggactaccatgcaggaagccaccagccaccatgctggagagatcatgtgcagagaccacgtagagagaggcccaaggagcccctcctagtccatccttgagctctaagtgtcttctagtagacgcaccagacatgtgagcgaggaggcctttgagatgactctagccccaaccaccgagtgagacctgcctatctgagcccagtcaactgccagggtcaccagagctgataataatcaatgattgttgttttatgtctgtaaattgacgttggttcagtaacaggtgatgggaacattgttccaactgtggtctcctcatctcatttgactgcagcttcatccctccagctgctcaggccatctttgatttctctctttctttcatacctcgcattctgtatgtcaaggaatatttggctctgccttcaaaatatccagaatccaatcacttctcaccacctccaatgcttccaccctggtccaagccaccatcatccaatggggccatcagtatggtctttcccctggatcactgcagtggccttctgactgcaatagcatcctacttccacctagtccctcctaccatttattctcaacacataggcagaattattctgccaacatgtaagtcagatcatgtcactcttcggcacaaaacactgcagcagctcccatcttgcttacagtcaatgcccgagtcctcacaatgtcctgacccttcttgtctctctgacctcactgcctagtctcctgcccctctccagttctgccgcagccccactcttcttgttagtccctgaatgcattaggctcacttctactttaggccctttgcatgagccatactcttcatttattcctggaatttatcattactttttgtttgtcatttgcctattattctatgtggcaattgctcattttttccccaagtgctttcatgtttctggatactattttccgtatcctcaaatgtgtcattttctttgattccttgggtgcctcactcctggtgcctgccatcctgctcccctctggactggtagctctctatccactatcatcctggcatttctcttcaatgctgttcagcattgaatcccatgacttctagttccacattattttttttagtttactttctcattttgtgggtgcacatcctgcagtagccacttaagagaggacatacatgtgaggtaaaatttgactccttgcatgtctgagatgcttttattccaccttcctatttcattgatcatctggttacaagtattctcagctgaaaatcattttcacacagaagcttgaaggcattgttttctttcagtgtggctatttagaagtccaaggctgatacctgatctttcgtatgtttttctctctcagggagctttagaagtctattctttattctgggtattctgaaatttgtgatgatgcaccttggggtgggcatttagttgggcctctcaatctggagactcacatctttcaattttgtgaagtggtattatttttactctcactctctctcctctattttctctttatagaatttctattagctggaaattggacttcctagagtggtcctcattcttatattttttcaattattattatttttaaatctctgtttatttttgttctactttatcttccaccaaacttgcttttaaatattttattcttactcttcttttgaacaatttccaaaatttcatttttgttttttcattaattcctttaaaagtaacatccaaaatagagaataaagcatctaactcttgtttaatggatataacatcttactttacttttctgaagaaattatcagatttttttttcattttttttctactccttccatcgtctctgctttctccaaattcctttatcctatttgtctggatccgtctcttccaagctggaggctgtctttaaacattaggtgatcctgggctgcctgttcttgtctaagtgtgactcactaaacacaggagtgggaactctgagtgagtgggtgaggcttgtccatagaaggacttacaacaaggtcattggatagcaaactggcttctttcttttctttttctttctttctttccttccttctttcttctttcttttctttctctctttctccttccttccttctttctttctttcattctttctttctttctttttatgggattttgctcttgttgcccaggctggaatgcaatggtgcaatctcggctcactgcaacctctgcctccccggttgaagtgattctcctgcctcagcctcctgagtagctgggattacaagcaggtgccaccaggcctggctaattttggttcttttttttttttttttggtagaaatggggcttcaccatgttggtaaagctggttggtaaagctgacctcaggtgatccacctgccttggcctcccaaagtgctgggattacaggggtgagccactgcgcccagcccaaactggctttcaaattggggcaggactccaagatgtcagaatgtggaggtcttttctctggagccattcagttatccagagacaatgtgtcaaatctcctactggcagtgggggtggggaggcaagcaatgggtgtaggagagagctggggtgcacctgctgtaggaggaggaagggggtccatcctccccctatacaggccacgtagcccccctgtttttagtcccatgcctcatgtccaccttctgtagatttggatctccccgtcctcagcacctagagttctacaagaccaccccgcttctgcttattagtttcctcatctgcagggagccaggtagtgatccccagctctgccatgtcagctcctgctcctctcccttttccagatatttgtgggactctctcatccatgttcatctcttccctcattttatctccttatgagtttatatattcttgattcctttattgccatttcagtggagttttggaagggggaagtgagcaatctgccatgcttactcagaagtgggctgcactttaaaaacaaagttggctgcattgctcaaagatgagggagggtttaggaaaaccaattcgtgtgcaagacatgctttctcatgcatatatgtacgcaggccttacatgatgaaactcctgtgagaggggccagcctgtgaaattcccagatagtgaacataagccccacctcactgaattgctatgaggactaaatgagctaacacaagtaaaatgcttagcacagggcctggcatttgaattctcaagggatagcagtgatgattattcggatagttttgggatgaacttgactaagggctctggggatttaggggaacttctctctgtcctcttctgtggcctggaggaggaagcaccttctgcaggcttctcctgggaaccccaccagcttgtggatctcagagctctttggagtttgagaaggcaatggggaaatccctctggtcttggccactctgacactgcataattggcataaatggggcatcccagctcagcctggaatgttctcgtttcttggcatgaacctgtctttttgcaaacacagtcactttgcgtctgtcccatcagccgtcttccaaaggtttcttctacccagtcccgccatacacatcgttttcaatattaaagtcactctttaatttgtaacaaagagatatgggttctagttctgtctttgccaccaattgcctagaaatagctcaaacttgggatctagatttgatctgcccggtttgaatcccgactttgcatctgccatcgatgagccgtgcgtgtcccacgggcaaacactcagtcctctatgggccttggtttaatgaagataataatagttcctaactcatagagctatcatggggctgaaagaaataatccatgtaaagcgcccagcctggtactcagagttcagataaagctggctgtaaggattactatctttcccaatttaaactctcccgcaaacttcgtagctccaggcacaactggaggtgaggactcaggcatataaagcttttccaggggctgaggcagaggaaatgtgatctcctggattttgtttgtagcttctactagaccacatagcaaccgagcaacatagcaacgaacgaaagcaattccatttaattccaagtcaagcaacttactttttcaaaagtatgtcattcctacttgaaaaaaccaatcttcctgagtagtcatcatgtcatagagacaaacactttatggtaaaaatgcgatttgattttgtttctgctcaaacaggttctcatcacaatcttttgtttgtttgtttgtttgtttgttttttgagacggagtattgctcttgttgcccaggctggagtgcagtggcgcgatctccgctcactgcaacctccgcctctggggttcaagcaattctcctgcctcagtctccccagtagctgggattacaggcatgcgccaccaagcccggctaatttttttgtatttttagcagagacggtgtttcaccacgttggtcaggctggtctcaaactcccaacctcaggtgatcctcccgcctcggcctcccagggtgctgagattacaggtgtgagccaccgcgcccggtgctcatcacaaattttaaaactgttcacaaatgttttcctctgctcttccgagcctactgttttataaacgagttactatactgccctctcgtggaacataatgatttctgtgagtctaagtccgcttggattttttttttttttctttttgagatggagtctcactctgtcacccaggctggagtgcagtggcacgatctcagctcactgcaacctccacctcccgggttcaagtgattctcctgcctcagcctcctgagtagctgggattacaggcacctgccaccatgcccagctaatttatgtatttttagtagagatggggtttcaccatgttgaccaggctggtcttgaactgctagcctcaagtgatccacccgcctcggcatcccaaagtgctgggattacaggcatgagtcactgcgcccagccatccttgcttagatttgaaataggactcccatttataatttatcattcatagtattaggctcatcggaaagtatgctttatccacatatttcacaaaactcttttaaaaattaattatgatttcattttcagttgttcgaacttggatactttatgttcactgattctgtcttcctacagcgattctagctgatgggtatgtcaattctgctcctcgagcttcctctgggttcagagggctactcataaattagtccacagcaattcaggcatagtggggacagcaggccacaggccaattgttctgcaggggttgcggttagaactcaaggaaactgcctgaaagcctcctttgtgccagctcctgtccagcctcaccctagctggaggtgctgatgatcctaaagaggatcacaacatgccacccccaaaatatgctacctcggcaaaagaataatttgagctatagacaatgaagaaacaacagatgcagtaaaagttctctgtcctcccttatctgcctaaatgcaggacctaaattttgctttgaggaagatgcccctctgtacccagaagaaagagagtgactcttatcaccagtgacaggagttgcattgagaagagtctacataaacaaacaaatggaagagagataactgttctcgtccattaatttctcccatatattcctaaacactttcttacagtttattaccccggaagcccaaacattcttttctttattcagtcacttctctataacctatcaccctttgctcaaatagtatataatttctcaagtctaaacacttattggagttttctacttctttttgtgaagctcctgtacccataaaacattaacatccgtaaaatttgtatcctttttctcttgttaatctgtgttctgtcagtttaatttgcaggtccccagcaatagaacataagagaatatgggataaaggtttcctcccctctaatcccaggtgtggagttggtcggcggaggggcaggaggagggtcagcagccttcatgcccctttccaggagagcttcttgcagttggttcggctcttgaaagttactcacctgcttcagcaactgcagctgctgtacccgacaaatggcaaaagacaagacaccaaccacacgagatcccagtgcgcacattacctgcctcatcttgactttcaggtggctttatgtgcctatgcagtgttgcaatgttaatcctcaagggtgaaatccaagctggtttatccgcagagctaccagggccagtggtgatggtgagcaacgaggcaccaaatttcttctcctaaaatacagaggatctgttcaacacactcgcagtcacagcacaaaaagctattctgtattaggtcagcaaaggaaaccagtccaagtgcaaaggcaattttagatctatgtcctgtttcctgtggaaacgcgaaactaaagggaagctcactggtaggacagagcgagcacccgtgaaggtgcagccttttttaaacttaagttctgattcagcggcgggtcctgcgaatccatcctttaacaagcatcccctgcgggaggggctctgatgcagagtgtaggagggctgcctgtattccgagaaacactggatggtgtctgccacgattcaatagcagacattattacagttattgggagacaacaggctgtgccaaatagtaaaataagaataaatatatttacatttcccagggtttggcccaatcagactgcttggctcacataaatgccagcacatagatatttgcaaacaataaacatatgtttagcatcctaaactctactttgaaataaaacattaaggaagtcattatttatgcaattagtaagcccataattaacactgaaaacaacaataattaacataatttttactatgcaatactaattttaaaatacctttcacaactcaagggatcaggcagttgttcaaatttttgtagaaggcctggcttacaccagcatccatgaccatcttcctttcttggaaactagaccttcagatcttattaatgtgtttgataatttcatcataaagagcaaatacaaatgcgatgtgcagacatactctgccatagtgcgaaatcgttctttgtaaaagtttgttcaatacaaactttatatgaaaaaaaattgcccttcaagaaaaaaaaaaaaagccctcaaaagtttttcatggaagcccctggtatttgcattgggaaatatgatccagttgaaacatatatttttaatttttttgctcattaacttaaaaaaagattactgaatgcctattttgttacagatactcttctcagtgtgggcctagcaccgtccttaaagcaaccttcagtgaacataatatatagatatatagatatatagatattttttttgagatggagggtctctcttgttacccaggctggagtgcaatggcacgatctcagctcaccacaacctccacctctcgagttcaagcaattctgcctcagcctcccgagtagctgggattacaggcatgcaccaccatgcccgcctaattttgtatttttagtagagatggggtttctccacgtt[134 bp omitted]ttcaaggtgaataaaaggattttaaaagattgtaatgattttatttctgtgatgatcattgagtgtaaattttacattctctatcaggaaatccatctaagacttcaatagaagtgaaaaaatatatagttttttagtctgtgattaaggggaactatttcatgggatgagaactgatataggccaggcacggtggctcacacctggaatcccagcactttgggaggccgaggcaggcgggtcacctgaggttgagagttcaaaaccagcctggccaacatgaaatcccatctctaccaaaaatacaaaaaattagctgggtgtggtggcgggcacctgtaatcccagctacacgggaggctgaggcaggagaacccgggaagcagaggtatcagtgagccaagattgcgccactgcactacagcctgggcaacaaagtgagactccgtcttaaaagaaaaatcagaccaaacattgccagtatgtcttctgtagaattaaacagaaccagaggcaagaagcaactttattcacattataaatgaaacacttttgttttgtgtataccgttagtttgttttaaaatactcacagatgatcacattaagaaataaaggccgggtgcggtggctcatgcctgtaatcccagtactttgggaggccaaggcgggtggatcacctgaggtcagaagttcgagaccaacttggccaacacagtgaacccttgtctctactaaaaatacaaaaaaattagccgggcatggtggtgggcacctgtaatcccagctacttgggaggctgaggcaggagaattgcttgaacccaggagacggaggttgcagtgagctgagatcgcaccactgcactccagcctgggtggcagagcaagactccgtctcaaaaaaaaaaaaaaaaaaaagaaagaaaatttccaagtttattttccccaaattgtaacatgatacagaagttgaagttcattgaatccgttgttgtactcattatgataataatgaaatgtttagtcttcttccagttaattatattaacttgcagcttgccaactggtgaacggcagatgggttaagacacggatgcctcaggctgaagtcctaaggccacgtatctccagccaggagcagcttcttcagttcaaccagctgacttttgtttcatattttctgcttgagccttgaaatgaaaatcttcaaagtcaaacattcttaggactcactatgttaatggtttcctttgtagtgtgtctggtttcaggacacaaattaaatcctatccagttagaagac[143 bp omitted]tctactaaaaatacaaaatattagttgggcgtggtggcaggcgcctgtaatcccagctacttgggcggctgaggcaggagaattgtttgaacctgggaggcgaaggttgcagcgagccaagatcgcgccattgcactccagcctgggcagcaagagcaagattctgtctcaataaaaataaaaaatttttaattctttaccacatcaagcatatgaacccagaaaaattttttgatgctctatattcttttgccaatattttatttaaaatagttcagtcctagttcttttccatctttagcgtaaaacaactttttattattgttaaactcaatttgggttcaaaatcctatttccagcctaggcaacatagtgaggccccgtctccacgaaaataaaaaaatattagctgggcatgatggcatgagcctgtagtcccagctactcaggaggctgaggtgggaggatcatttgagcccaggacgctgaggctgcagtgagccgtggtgatggcaccactgcactccagcctgggtgtcaaagtgagactctgtcttaacaacaacaaaaaaatcatatttgattcataaaaggtgtggagtaatatgtattatatccccctattctagtcttgaaatgatttatataattgtggctatttgccatatagatctgaatgaagaaagaggaagagagagaggaaggaagataggaaaggaggaaggaaggaaagaggagtaaggtcccaggtgatgcctctagagtaaaatgtgttcactgggtgcagagaccatgaaaaggtgcccctctagggagggtgggacatgggaagagggtgggacttgggagggcagggctataaccacgaaggggtcagcttgtggcttgggtgatgggggctgaaataaccaaagggtggcgacgcttagatggccacactgttttccaccacgctgggccgcaggtactcgtagggcatgtccagctttgcattccggatctcaatttccttatccagggcagccagctcctccctgaacttcttcagcacagccttaggctcagggcccgaaaaatactcctcctcatgctggcccacagccacctgggagggagaggaaaaggtggctgagagccttatgacccccagtctgggatgccacacgtccccacagctgcctccttccttagggccctgggcactcagctctcaccataacgggctggcgtctgcccagctgccaagtgatggacatctggagagaagcctggtggaagttgggcagtgtcgccatcactgtctccagcgttgcatccttggtggttggcgggggcagccgcatcgtgcagggtgcattaggcacccaagagtaccagtccagctaaggaagggcagggatccagagtcagtgcctaccaagcacgcgagccccgtggtccacctgcacacagacccctccctcactccaggccccaaattcccagctgcccatctctggtaagtacctggcccaggtgcacagaggcgtgttggccggtgcaggtgaagatacacatggtgacaaagtggcaaacctggtcccgagcctgtaaagagacaggaaaccctgcaaggggtgaagagagttagaagctgcgaaggcaggagtagggcagcgctcagaggaagaggccaagagaggagaacaagggcgagaaagagcggcaggaatgctcagttaactcttacaggaattaccatgacagcaggttggggtgggggagtggggagctctgccgggagggtcccactcagtggggtgctgctgctgactcacactggctcgcaagagtcagtccatgacgttaggtgtttagcaagctggtcagcatcaccttggtagtcacagtaaaaatatttataccatggaaatgtgcaaaagctacaaatcaggacggttcttcccgagagtcagttgttaaacatttatgagcagccactggtcccgctgcatctggcacctagaggttctcagtgtgtaggacggggacctgtctctaggtgacagggagtggaatctgagaaggcctctggagttctcataggtgttgaaaatgcttctgggagatttcacagaagcacaggggattctgggaagatctcttgggctttgtgtctgagatctcagggcaggggctcctcttacctcggtcctgggccccttgcagcccgatttcagtgatctctcgacaccaggtctgcagctctgggtcgtctttcacagccacgtctgtcttatagtggagactcacgattccttccacatacctaccaaccaacggagcagggccagggagctgaagccagctctgcccctgctcacatggccaggtcagggccccaggcccccaaccagacgcagacctcctgctctcctacatgtcttctccacccccacttgcacccccactggccttcccgcttgcctcaccgatagatgatttcccagagccgcagcgcatcttgggcatagaaggaagacttcactcccaggagcccccggtcggccaagtcatcagggggacagaaggagctgtaggttaggaaggctccagcttgcttgagcagctgcacgtggcctcccccaccagtgctcattatctgagaagtgagggtgagcagggtcaggcgaatcgacctgccctgaatccagagctggaaaaaagacagacccagaatctccctttctcttcccatacctggtcgaaaattcccatgtcagagaccagcccagtcctggcccggacgttaatttccagggtgtatcgcaggtggggaattataagctagagggagaaacacagggaagggcagagtcagaggagagctgcaagatccctgcaggaaacaagggctgacagcaggaaaggcaccaggtcttcagaaaaagcacagacgtaaagttcagtggcctctcaacagtgagttttcagaagtaccattcaacccagcaatcccattactggatatatacctcccaaaatataaatcgccttactataaacacacatgctcacggatgttcatccagcactactcacaatagcaaagatatggaatcaacctaaatgcccatcaacaatagaccaggtaaagaaaatgtggtagacatatgctgtggaatactatgcagccatgaagaagaacaagatcatgttctctgcagcaacatggatggagctggaggccataatcctaagtgcactaacactggaacagaaagccaaatatggtatgttcttacttataagtgagagctaaacattgagtacacatggacacaaataagggaacaacagacaccagcatctacttgtggacagagggtggaaggagtgaggggatccaaaaactacctatggggtaccatgcttattacctggtgacaaaataatctgtacaccaagccccatgacacacaatttacttacagaacaaacctgcccatgtatccttgaacctaaaattaaagttaaaaataaatacataaaaataaaaccactgagctttcagttgatttgcatcaactatttccattccacaaaccagacttagtgctttatgataattgaaagaaatcattctttgttgttgttgttttgttttgagatggagtcttgctctgtttcccaggctgaagtacagtggtgtgatctcggctcactgcaacctccgtcttctgggttcacgcgattctcctgcctcagcctcccgagtagctgggattacaggcgtgaaccaccgtgcctggcctccttttcttttcatattttttcataggtctagaccaagatttctcaacttttttttttttaatcacccactaagtacccttttgagatgttttttcctaatctcactccacctcattaaatattaatgctacatatatactgtatatctgtctatgtattgcattatatctgtgctttatatagatatatatcacattatatctgtgctatataaagtaataagatttggccggccacggtggctcacgcctgtaatcccaacactttgggaggccgaggtgggcggatcacctgaggtcaggagtttcagaccagcctgaccaacatggcaaaacctcatctctactaaaaatacaaaaattagccaggcatggtggcaggcacctgaatcccagctactcgggaggctgaagcaggagaattgcttgaacccaggaggcagaggttgcagtgagccaagatcgtgacactgcactccagcctgggcagcaataataataataataataataatatttttcacacacattttccaaccatcttcatcccttgggggacattgtgcccccactgagaatggatgttctaaccactgcctccctccagagcctggtctcctccctctctccttcatccattacactaggcttctttcagttctttaaagaagacaaacttggaccaggcacagtgactcacgcctgtaatcccagcactttgggagacctagacaagcagatcatctgaggtcaggcattcgagaccagcctggccaacatggtgaaatcctgtctctattaaaaatacaaaaaaaattagccaggcctggtggtgcgcgactgtaatcccagctactggggaggctgaagtgggagaattgcttaaacccaggaggcagaggttgcagtgagccgagatcgcatcactgcactccagtctgggcaaagggagactccatctcaaaaaaaaaaaaaaaatcaatgtctggaaaagatctttttaacgttatttcacgggttcctcttgttggatggaatccttggtcatttgcatgtactgtgctttacatataaaaagagtaagattattttcgccactttcccaggtgggaggtgctatcccctttgaaaatgcatggccagccctgctcattctctgttgctctcacattgtccattcattgtttctctctgtaccccgagaccccacagagagggagcctccagaggtcggaacgtgccctggggcagagatagtggcaggcaagagagaaggggataaggagttaccttgaagataggatgtatcgacggcaggcacctcatggtggccacaacaatgacctcagccatcaagtgtcccctcagaagatgagactgcagctcatggagctggaagtcagagctgcgcacccagcatttggccagaagccaggccattgggggatccgtaggcaagaaaaggggaggtggtggggatcctgtgcggggcagctggagctggagcagggacaagtgtggggagagaaggcatgagtgccaggcactcagcgattcccgccccccttgcatgttaacctcacccttcgtcctccaaacctgttctgctttccccatctcactcctgccgctccctacggctcccgtttcctcccctccccttcctgcccgctcagtgcattagcaccctgcaagctgctttgcctccagcattctgcagaaactgctcttctggtgcctcctccagcctccacttcccctttcagttcccacagtgtggacaagattcaaaccacctgcttcctccatcccacactgttttttgaaaactcatcttttggccccacctctacacaaatgactgaatctcttgttctcagctgcctgctggataatttaagtgtcttcccgttacctcaacattggccagacaaaaatccacctgggcaccctgttctctttatcggtgctatttctgcaggcaactggcctggctcccctttcccctctccttgatctccctctgcactcgcatccacctgtcctctccatcctgatggtcactacccacatccgagctcccctcctcctggggtcagtgctggggcatgttgccccagtccctatttctagcatctcccctctccaacccaccctaaacaccactgcccacaccgcgtgcccacagcacgtttcatcacggccttctccagcttcccacctcatactccttagcctggcttagtctggcttctggtccaactgtcccctaggaattgcctgactcctctacctcagcctctgcccagtctgtcttgcccctgaggaccggtccttcctctccctcctgcttgtctgagacctggccctcctccaaagctcgtgacaccccacctccccaatccctcctgggctgtctctgtcctcagggacttcctcagtcctggagcttctgcagactggcccagtctgtctctccagctacactgcaaggccttcgaatagagacttggcgcatttcctcctttcgcgtctcccaggtgccttagcccagtgcctttgcagatggtgctcagtaaattttgataaggggctgagctttctcaaaagccagagactgggagcagaaatcctgagtcctctcacctggatgaccatgggcaagagtttcccatcaggctgcaatttcagcatgactagaggggcagccaggtgctgctggctacagagaatgacgttggccttgatcccatccagcagggagaagtcagcttcgaacagtgtgcctccctgggtgggggaagaggtcaagggctgctatcaacataaagcatcttcttcctactcggattcctccaagggggaagagagtggagctaactcgtctccatcatctactttataccaggtaatggatcatgtgcttacttcctcatatcatttttttttttaatcagggtcttaccgtgctgcccaggctggagtgcgtggcaggatcaccacggctcactgcagccttgacttccttgggcccaggtgatcctcccacctcagcctcccaagtagctgggactacaggtgcatgccactacaccaaagattacaggtgataatttttgtacttttgtagagacagggtttcaccacgttgcctaggctggtctccaactcctgggctcaggtgatcctcctgcagcctcccaaagtgctgggattacaggtgtgagtcactgtgctcagccttataatttttatacctagttgaatgagcctcaattttacagaagaggaaacagataatcagagaggttgggtattttgcctgaggtcacacagcttacaaatagcagaaccaggattcacatccaagcctatctgcccttaatcccatgaatttcctctctgttgttccatatcgcctcctgatgaacagccacagcactctgatcctgactctcttactctgcacactccccgaatccctagcaccaggggccagtcacatttcttcatttgaccttgtttctatcaaccattccatcttgcacgccctccctccgcagctactctcgtgtaggaaggaggccgagcagctgagcttctccagggtccctcaggacctctcctgcagaatccgtccttgctggctggcagcaagccaggcccacagtgggtcccgcagcagcatcattggcactaggccaccccacttcactgctgagcttcctcagggctctgatgtccatacctccagctccttctccagctgggcctgcagttcctccatgcctggagggaacactaggcgagcaggaaggtgagcagagcgcctcagcaccacggggttggcgccattaagaaactggtacccaaataaggcatcttccttccaggagtcccgcacgcgctctggggaaggcagttgttgagcaagttgtgggatctgagctcttggtccttccaaccccaccaaccatgcctccttgactccagcccaccagagggacccaagtctctggtctccccaccctgcttctttcaattcccctgggttgggtgggatctgggtgggatctggggggttgggagacatactggggtgggggactgaccagccagcttgctctgaccacaccagaaaatccggttgaagtcatctagatccttccagcaagtcagaacatttagagagtctttgatagcgaggtcggccagccttcagggcaggatggggcaaagggtttgagcatcattctgaggctctaacatgacgaccacaggcaccgatcctgggccagtccaatgcagtgcagcccataagccccttggcttccactagaccaggacacctccctctcacccagcctccccttgctctcaccccttggccagcgaaacctcaaagtcaactctcttgtcttccagaaatcgctcatccacagggaggtcatatagtttggccccagccatattcagaattaacccgtccttccagtttccccacctgtggggcaggaaggaaatcaagtatgggtgctggaagcatcagcagctcacgtggggtcaggggaggagggctcaccggtacaacttccttctctcttccagctcttcttcccggtgtttctggaacaggccctgagggtcctcgcccacagtgcggcctagaaggacagaggaggacttggccagtgacttttggtgagcgcctcttcttgtctctgccaggagagcctcagcaccccgtccttctgtgtggcctctgccccttcagcatcacgcccctcccccaggctccagccactttgtgccagctgcagccaccgccccttcgacacccccaaagaccccggcgctccaggttccagcacccccatcctgcgccctcttctccacacgcgcatccccccagcttctcacacagcccagaggcctcctgacaccctcagccccgcgcttaccggtgccttcaggcaggctcaggacgccgttgccctccacccagcggtaacaagggaacctgacctcgtccccggctccggggccctgcacagagatccagttgcagaaccaggcgtcgtccttaaggaggtgccgtttgcgcagtttcacaaacagcagcggccccagatactccggtacttccaccttgagttctgtctcctgcgggcgacagaagaggctcagccccggtggggcctggcgggaggggcacccggctgagccctgctccctccagcgcccacgcccttcctcggagcctctgagaggaggagacgtatcggggtgcggggactgagccagagagagagggaccgcgccgagcaggtggccccaggactcggttctgaggggacggggacggcaggtgggaaggtgcgctcctgccttcactttctcctccctgtggtcactgactgtgccaagcgctgggctgagcgctgccgcgccctggacgagcgcgctgtggagcccggacgcgctggtggcaattcccgctgtgcgaccccccaccccaccccgcccgaggctgaggacctgcaggggccccaccggcctggggacaaccttcccggagacctggaggcggagagggctcagccagggagagtgacagaaagggaaggcaggggaaaggcgcgcagaaagagagcggcggggaagggagggcgagcagcatcttggagctggagctcagagcccaggtgtggggggtcagcaggtccggaggctctcgaaggtggcgccaggggctttggatttggtcccgagaacaagcgggagccgttcgaatgtgttaagcagggggagtgaattagggagaaatcattccggcttcagaagggcttggaaggtctgcagcagaggtggcgaggccgctggaggtttgaaatggcttttaaaatagagaaaccgggaggaccgacgaccgctccggcgaccgcagtttccaggcaccagagctgtgtggaatgaggggcgctcaggagcatccccttaattccaaggagatcgagtagcgggaacatttattgagcctttactgtgtgtcaccaactgcccaccatagggaggaaaaaagggaggagggagcgcgcctttccaccttccgtgccccgtcccctcaccatggagtcgcggggccacctgctccgtgcgcattttctctcttcctggctccctttgccccgctttctcggaagctcggagcaagggcgtggagtgcggggagcagggctccgcaggttcaagaggacgcgggcggtcgggggcgggacggatattgggcagggacgcgggagatgctcagggtctagaactgactgcgccggattcttgtttagagggaggtgaagagaggaaggaggcgcgggtgacaccgggggaggcaggaggagagggctgggaggtggggagaggggaggacctcatccgggcatgttgctttgacgttccctgagacagacatccggatttggggatctgggagagagctagagcagtgatgggaatttgggctttcgcggaagaaaaaaagttaacaggaccgggtagaacacccggtagatgtgacatgagatatgacgggaggtgggtcgggaaatcgagagcgttctcctgtcttgactccccatcccttccctctcaccacccactccaccccaggtgataaagcctgaaaggtagagatccaacagcgctagcggttgaaacggtttttaaaatagagaaagcgagaggaccgacggcggctccagtgactgctgagtttccagacaagggagctttgtgcaatgaggggcgcacaggagcatgccctcaattccaaggagatcgggtagcggcaacatttattgagcgcttactgtgtgccaccgactgccctaaagccccccacccccgtggcctccgcgcgctttgagcccaatgcgcgggcccttggcaaagagaatcggccagaggccaacgggggcgcatgtcctccccggtatttgactgactcggagccaggggcgcagcccaccccgcccggctctggggagctcaccttgccccgtgcgggccacagtcgcttcccgagcgccgcctccccgtgctggccgaccagccacagctgcacctggttgttggaaccggcatagagcgaggccccagtggacacgcggatgcggtagagacccatcttgctcaaagatgtttcgctccttctggtggagaagggtggacgagctaaataacccagcctgagaccccgccctctcggaggtcgcttggggtcggaatgtgggtggcaggtctccaatcaactccgcctaccgctggggcccccagctccaaggagcagagcttcaaggggcagaattcagccccagtccaaaaggcggtgtcctggcgagagcagggagtggaaaccactatcttgacgggagggagaaaaagaaaaggatttggaccgaaaacacgcaggaagagggaatcaacgcctggtacagcaggcaggcgaggtgggggtaggagttatgcacgtgtgtaccacggactttgggccaagcctgggtggctgggaagccaacctccatctaaacgcacgcgtgcacacacacacacacgcaaggacacgcgcgcgcacacacaagcctcacaagttggattgcaggagagggtgaagtgggcgaggagacccagtttgcagtggcatttgaggaaggtacattcaggccacggaattcattcgaccagctttgcacacttgccttctctgtgccagccactgggactcattccttttgagcataaaagccgctgcctccctgttgcctgcagaataaaagtccaaatgtttctggcattcaatgcccttgctaacctgacctgctctcctcacctctcatcccactgcaccctggcatctcctgtgctggagccatgtgttccccggaaccccccctccccccgccgcccctgctgttctctcaaagaactcacttctgggttagtctggtcatgcttctaaaccctaattcgtctccagtttctttttgggctggagccatgtgttccccagaaccccacctgctgttctctcaaaagaacttgctcctggattagtctattcatctattcatgcttctaaaccctagttcacctccggtttctcaggaaagtcttacccggtactttcaccccccaccaccccaccagagtgaattagctttccttttttttttttttttgagatatagagtctcactctgtcaccctggaatgcagggtggagtgcaatggcacgatctcggctcacggcaacctctgcctcccgggctcaagcaattctctgcctcagccttccgagtagctgggattacaggcgcctgccaccatgcctggataatttttgtatttttagtagagacggggtttctccatgttggccacgctggtcttgaactcctgaccttgtgatccacccacctcagtctcccaaagtgctggaattacaggtgtgagccacggcgcccggcccagctttcctttctaacacttttctccttgcgcacacttctactgttgcacagttaatactgcagtgtgagcatttgtatgtgtgtatcccccactaatgtgagcccgtcctaggcagggactacacacccagcaggactctcacttttgtttcccctggagacggcacagtgtcagggtttgtgggtgtcaataagtgtttgctgaaacacactgagctgaaaaattcattataaatgaatgcttcccttgggggagacaaagggaaacaaattatcaggcaatgtaaacaaaaggggaatactaacataaacttcatggcatggattacaatcagcctggtaacacaaatgaagtccacgaaaatatgtctgtgatgcatattttctggtttgcttgttttttgtttttggtgtttttttttttaatgagatggagtcttgctctgttgcccgggctagagtacagtggtgtgatctcggctcactgcaacctccacctgccgggttcaagcgattctcctgcctcagcctccagagtagctgggattacaggcacccaccaacatgcccggctactttttgtattttcagtcgagatggggtttcaccatgttggccaggctggtcttgaactcctgacctcaagtgatccacctgcctcggcctccccaagtgctgggattacagccatgagccatcatgtccggccctgcttaattgtttactgggaagtacattcatgtgattcaaaattcaaaaggtacaaagtgatattcactagtttctccctcctcttggccccaagccacccagttgctccactcccagcaatcacagttaccagtctcttctgtgcactaatattactgagcaaatacacgcctatctttgtctttttctgcacattgtagcatgccttattctgcatctcgtttttccatagtgcaacaggaggtcattccatatccatgcataaagagcttccttgttctttgctaaggctgccatttgctgtaacgccataaattctactagtctcttgtagtggacacaggttattagtaatcttttgtagctatgaaaaagtgctgaaagaaataaacctcgcatatacagcatttctcgtatgaaagtatctctgtagaacaaaaccctggagatagaatttctggaccaaaagcatatcgaatttaggcagaaactgctcaattgccctctgtagaaagttgtactgatttagactcccaccagtggactgtgtatgagaatgcccattcttcctcactcttgccaatggtgtgttcataaccttaccttagccaatcggataggtgaaaaatggtaccctagttttaattttaatttgcattacccttattatgag[133 bp omitted]gtctctcgagtagctggaattacagtcgcctgccaccatgcccggctaattttttgtatttttagtagagatgggttttcgctatgttggccaggctagtctcgaactcctggcctcatgtgatcagcctgcctcagcctcccaaagtgctgggattacaggtgtgagccaccgtgcccaaccaaaaggttttttttataagtgaaattcagaaaaatcaaaatgtggtgggtaaaattcatcttccatagaaatggcacaaacccagtaattttcttgcagattaaaagtgtgattgaagagttgggaaggcttccaaaagtaattcacagtaacttgtgggtagactgagtgaggttagattatgatgcagttgtgatgggagaggaaagacccaggccatttcttcccgtcttggatagggatatctatggtggttagcctatgcctgttccaacattgtatgttgggggtggggtcagatgactttctctttagtttacaggtcttcagaagaagaggagcccaggcacggtggctcatgcctgtaatcccagcactttgggaggtcgaggtgggagaatcagctgagttcaggagttcaagaccagcctgaccaacatggtgaaacctcatctctactaaaaatacaaaaagtagccaggcatggtggtggacacctgtaatcccagctactcaggaggctgaggcaggagaatcgcttgaaccccagaggcagagattgcagtgacctgagatcgtgccactgcactccagcctgggcaacagagtgaaacttctttaaaaaagaaaaaaaaaaagaagaggaggaattgtattctggaagtatacttaaggtaatacagttgagaaatctcatctatacatggacctgatttagatgatgaaattctagactttgagctgatgctataatgggattcgactttggggtagcttgagagggagcgagtgtattttgcatgtggaaggaatgtaaatcaccagaattcagagggcatgctcgtggtggccattctttaaaacatcccccagtgattccgacctcctgatatgcatgcctttccatagtctcctacattgtgtctgggttggtctgcaaagccaatgcagtatgaaatgatgtgtgtgacttccaaagctaggtcctaaaagacattagggctttccgtctcctccctccccactctccctctttcttgttctgctttctctgagagaaattaactactatgtcatgaggtcactcaagaaactctatggagaggtccacgtggcaaggaactgagccctcctgctacgagccagtgaggaactgaaccctccaactaccaaccacgtggggcagccatcttggaaacagatcctcctgccccggttaagacttcagatgactacagccaatctcttgactgaaacctcataagactcttgaactagaaccaactgactcccaaaactgtgtaaggtaatgggtgttttttgttttgttttgtttttgagacagggtcttgctctgtcactcaagctggagtgcagtggcatggtcacagctgactgtagcctccacctcccaggctcaagtgatcttcccacctcagcttcccaagtagctgggaccacaggcatgtgccatcacaccactgagttttgaggtcgttgtaaagcagaaatagataactaatacggtctgcatgcttattttctgaatcctcaaactcccaagcttatgtaaagccaaaaaatattcaatgaactgaccactttcaaaattagttcactcacctcttcctccttttttttttttgtggcttttgtttttttgtgtttgtttgtttgtttgtttttgacccagagtctcgctctgtcacccaggctggagtgcaatggtgcgatttcggctcactgcaacctccacctcccaggttcaagcaattctcctgcctcagtctcccgagtagctgggaaaacaggcgcttgccgctatgcctggatgattttttgtatttttgatagagacagggt[145 bp omitted]actggctacagagtgaaatttcaagtcttgaaacattagaagactttgtaaagtccatagaagtactgttagaaaacggatcagtcagcaaagcaactgacaaataatgttgatgttgaaagaagaggcatccacctgaagtggttcagatgagctgagcagggacaggagagggccagtcaataagtgacacattggctgcagtcaaagcgacaggcttggacaacgaacaaagcttttctatgcaggtgatgtccactggtcacttatgtgtaccctctctgtcccgatatggctccaggacactgacatcagatgatatttccaaggtaagtgcagagaagaccctggatgtggactttgcttctccatgggcctcctaatgcctgggtttttgaaactcaaaaatccaaaactgagctcaagtgcagtaagccccagctgagattatgaaagtaccaggatcataaagatacatgtgtccactgggtgcagtggctcctacctggaatcccagcacttttggagtctgaggcgagaggatcacttgagctcaggagacca[143 bp omitted]ataatgaaaccctgtctctaataaaaatacaaaaattagccgagcatggtggtgggcaactatagtcctagctacttgggaggctgaggcatgagaatcacttgaacccaggaggcagaggttgcaatgatccgagatcgtggccactgcactgcagcctaggtgacagagcgagactccatctcaaaaaataaaaacaaaaataaaaaatattagctgggcatgatggtgtttgcctgtaatcccagctgtgtgggaagctgagatgcaaggatcacttcagcccaggagttcgaggctgcagtgagctatgattgtgcctgtgaactccagcctggacaacagagggagaccctgtctctgaaaaaacaaaatcaaaaaaatatgttaatatcgtactttacaagtattattttgtcaaagtggtgtcgagaatgtcaaatattgcttctcagctgggcgcggtggctcacgcctggaatcccaatgctttgggaggctgaggcggatcacctgatcaggtcaggagttcgagaccagcctggccaacatggtgaaaccccatctctactaaaaatacaaaaattagccagtcatgatggtgcgcacctgtgatcccagctacttgggaggctgaggcaggagaatggcttgaacctgggaggtggagcttgcagtgagccgagattgcgccactgcactccagcctgggcaacagagcgagactgtgtctcaaaacaaaacaaagaacatgtcactgaaatgtaggcctgagggaaagaagcaaacgatcagtggaatttttttctgcccagtgttaaaaattgaaattgacctccaagctgtcaatgccttcaactctaccattgcccaacaattctcaaaaagatacagggtttggacatcagacttcagataaacatactcccacaagcaggaggaaaaaccactctgcccgtgtgggttaaggctagaggagctttagatgaacaaaagcaccaaataatatggaatgcagtttggaaaacaaggatcggttagaggaagatggtaatttacagaggagcttcactgggaaaattcagacttcagaataagctgaagatcttcctgaattcacacaagagagggagagggtatcttctaccttagaaaataaaataaaacagagttgttcctggaggaaccaccttagattttggagcagaaattgatgtgaatctggctcagcctctaagggcaaattctcaacaatcaagatgtcagggagtggggttcagtggtcctcccacttctgatttcctaagaacaagctgattggaggctgttggcgccgagaagctataagcagaactagaagcagagcaggctatatgattgattaggggtgcatatttgcctttctcagttggtcctaagtggaagtggagacagaaatgaagaaatctggcagttattgaccaagcccttactgtttgaggccaattgctgtagaggatttgtttggcttccttccagggctggttgctacagaggttatgggacaaaggtctgtgtttatatttgattctgtccattgtccttttgtatagtcagtctctcactagcgatgtatgacagttccagctgctctgtattctcaccagtacttggtactgtttgttttggatgcaagggatggtttgtgggggagtggggagggattagccattctaataggtatacactggtatgccgttatggttttaatttacattttgctaatgactgactatactgagcatcttttcaagtgtttatttgacatttgtatatctactttggtgaagtatctattcaaacttgtgtggatttttttttttcctcgttgttgagttttgagttatttatatatttgtggagcaactccagcttggatgctaagcagctatgttgacttttttttttttttttttttgtagagacagagtctcattttgtcacccaggctggagtgcagtggtgcgatctcggctcaccgcaacctctgcctcctgggttcaagtgattctcctgcctcagcctcccaagtagctggaattacagggatgcaccatcacgcccagctaatttttgtatttttagtagagacagggttcactatgttcacactgagaccagtatgcgccagactggtctcaaactcctgacgtcaagtgatccacctgccttggcctcccaaagtgctaggattccaggcgtgagctaccgtgcccggcctcatgtagacttttgattaaccacagttcaaggagcctgtaagatttccagtttacctattgttccttgtgtaagagtatgtacttaccataaagcctgcccttcagcaattgtcctatacatcccttctgaagcatgcaccctttccgtatgatatataaggcctgggtctagggagtagtggagaggggatccacgatcttgtctcaccaccacctgagacacagatgtggcttctgttcctaagtttctattaaatgtttctgagaaactagatatgtcagcctctttcttcggcctctcagcttcctcagacttttgcagataggtttgcgtaagtctgcccagcgtggagcaatattttagatattaagtccttttttatttatttatttttattttttttttgagatggagtctcactctattacccaggctggagtgcagtgacgcaatctcggctcaccgcaatctccacctccccggttcaagcgattctcttgccttagcctcccaagtagctggaattacacgcatgtgccaccatgccccggctaatttttgcatttttagtggaggcagggtttcaccatgttagccaggctggtggtcttgaactcttgacctcaggtgatgcgccctcctcggcctcccaaagtgctgggattacagatgtgagccactgcgtcccgccagatattatgtcctttgaaagacgtgtgatttacaaacattttctccccacaagcagcatctcagagtgaagatgcctttttatctcttagcagtgtctttagcagagtagttttgaattatgatgaagtacaattcatcaatttttttcattaaggattgtgttttgcctatgcctaacaaaagaccataaagattctctcctgttttctctagaaagtttatgatttcacactttatatttaagtctgtgatccattgagttaaattttgtatgaggtatgaagaatgggtcaagttcattttttgcatatgaatattcatatgcaaatatcattccagcaccatttcttgattcctccattgaattgcctttgcatccttgccaaaaatcacttcaccacacctatgcctatgtttgggctatttttctccatgatctacgtgcttatcattccaccaatactacactgacttgatgactgtagctttataagtattgaaatcaggtagtactagtcttgaaacatcgttcttcatttccaaaactattttagatattccattaccttagccttttgctataaattttgcaatctgcttattgatattgataaaaattattagcataaattcctactgtatttttggccgggtgcagtggctcacgtctgtaataccagcactttgggagactgaggcatgaaggtgacttaaccccaggagttcgagaccagcctggccaacatggtgaaactccgtctctactaaaaatataaaaattagctgggcatggtggcgggcacctgtaatccgagctactcaggagctgaagcaggaggattgcttgaacccagaaggcggaggttgcagtgagccaagatcatgccattgtactccagcctggacaacagagtgagactctgtcttaaaataaataattaaaatcctttttttt[133 bp omitted]gcaacctccatctcccaagttcaagtgattctcctgcctcagcctcccaagtagctgggattacaggcatgcaccaccacacctggctaatttttgtctttttagtagagacggggtttcacca[136 bp omitted]tcactttgctgccttgggatcactcttgctaactctgtgagtgagcctttgctcactcttggaacggtcaccatgctgtgaggaaacccaggtggcatggagagaccatgtgtggatgtcccagccgacagccctaactctagatccaggtaaaaagccagtactgaccaccagtatgacttaggaagtcttccagatgactccagcctcagccactgtctaactacaaccacatgaaagtctccaagtaaggataatttagctgagcccctgtcaattgtcaaaactctaaacgctaatagtaaaataatgattgatgtcttcagtcgtcattttggagtgattcattatgcaataactggaacagacatgcagaagtcaaagacaaagtagaagaaggcctggagagatgaactaagtcactccttgtctcaagaagtgttggccaggcgcagtggctcatgtctataatcccagcagtttgggaggccaaggcgggtggatcacctgaggtcaggagtttgagaccagcctggacaacatggtgaaaccctgtctctatgaaaaaactaaaaatacaaaaattagctgggagtagtggtgcacacctgtagtcccaccaaccggagaggctgagacag[136 bp omitted]cttacaggagacagaagcctaggggataaggcataccagctgcaaacagggcagacatccacccagtggcactccactttgtggatgccaagagatgtgtggtggccgggcatagtggctcaagcctgtaatcccagcactttgggaggccaaggcgggtggatcatgaggtcaggagatcaagaccatcctggctaacacggtgaaaccccgtctctactaaaattacaaaaaaatcagccaggcgtggtggcaggcacctgcagtcccagctactcgggaggctgaggcaggacaatggcatgaacccgggaggcggagcttacagtgagctgagattgcaggaaaaaaaaaaaaaaaaaacaaacaaacatgtgtggagcccactagctgaatctagtgtgaaaaaacaaacaaaaaacaggcaggatataccaatagctctccaggtcatcctttaactgattattttccagccccacccaacatcaattagccatatgtactgatggaagtcatgtaggtcgagcacaggagacatcacagagaaaagagtgaggaaatttaaccagttgctaaacaaccagaaggaaccaggaaataatcccccaaaaaagggccttagggaaggatcctgtccaaccaacccttttggaggaaatgagaggagtactgggcttaatcattggctgtaagatgacgatgactccagccttggtctaaatacactgtccatcatctgggtgaagcggaggaagacgacgtgagttcaagaactccagaattcttattaaatcccaagtctttgatgtggaaataaagtttaggaaatggttatgaaagaaaaatgccttgtagaaaacttctgaataattttaaattaagaggaacagtggttgaactaggtaaatcaagaagtatgagtacatttatgtttacagaaataaagattgactaaaatatgaaataccacaaagccaaagaatgcaagtaggacaaattttgattttatcttcgtcttgaaataaattaaacatggaaaattcaatgaattagatttcttttctgtctgactctaatgaataaaacccatgtgtgttatgtatgtgtaatgtgtgtatgtgtgtgtgtgtgtgtgtgtgtgtgttttcagttctattcaggacataagtcaagctattaaaaacaaatatttacaatattggctcaaactgtgcctgttttcagaatgaagttatcaggattttggtcatttggaagtaataaggttatacttggctataatgtattaaaagcattgctgagagacttggaaagaaataaggttttttggaaacctcagaacctgagaaaagagttggcaactggaagattttctagtgaaattccaagtgatatggtgtcatttgaaaatgatacttaatcctgcaaacaatttacatggaattagttgttttcagttcagctgcttcactttgaacttaaaagtgaaagataggccgggcgtggtggctcacacctgtaatcccagcactttggaaggctgaggcgggtagctcacctgaggtcaggagttcgagaccagcctggccagcatggtgaaacccccgtctctactaaaaatacgaaaattaactggacatggtgacacatacctgtagtcacagctactcaggaggcagaggtgagagaattgcttgaacccggaagacggaagttgcgtgagccgagatcgtgccattgcactccagcctgggcgacggagggagactgtctcaaaaaaaaaaaaaaaaaaggatgtagtaagaagctttgaccacccaaacccacccatgacttgtgaatgtgtgtgcaatttcggaaacacctgagattcaatataaggtaaactgggccatagataccgcagtaagattaagaaaaacaaaatacttgtaaatgttctaactgaaatgttgaactgaagacagagtatttaacataaagaggaggctaaagagcaagagtgtaccaggtcaaactgtcaccaggatatctgacaaatgtcgctacctgaaatgcctgtgaagagacagacggggaagagcctttgcaactctctccttggggcaaacggtaggctgtggctcaaagatgagtcaaggaatagggttgtgtggaagtccctacagtctgcctcaagcacagaacacacagtacataaaataaacacacggaagattggcctctgccattttttattcccaaggtgatacatccatccattccaccctatgcctgagaaagctggcctcagcaaccagggtgagaacactacctctcagtccaaagagatactgcagacggtcctgattaaaaaaaaaaaaaaaaaaaaaaaaaaaatgggggaggggagagaaggggaggggagggggcacagtggctcacacctgtaatctcagcacactgggaggccgaggcaggtggatcacctgaggtcgagggttcgagaccagcctcaccaacatggagaaaccccgtatctactaaaaatacaaaattagttgggcatggtggtccatgccggtaattccagctactcatgaaggctgacgcaggagaatcacttgaacctgggaggcagagattgtggtgagccgaaatcacgacattgcactccagcctgggcaacaagagcaaaactccgtctccaaaaaaaaaaaaaaaaaaaaaaaaaaaaaaaaaaaagccagacgccgtggctcatgcccataatcccagcccttgggaggcca[134 bp omitted]gaggcaggagaatcgcttgaacctgggaggcggaggttgcagtgagccaagattgcgccattgcactccagcctgggcaacagagtaagacttcatctcaaaaaaaaaattgttttaaatatataaactcgtaagaaaaaagacagtaggagagattacaactgcagatgagatttaacagattttgtcacctggaagcagccaggtgataaccgacttaacagattagaaaatgatgagaacggtgggcccaaaattggtggattcttgggctcaccgacttcaagcatgaaaccgcggaccctcgcaatgagtgtagcaattcttaaaggcagcgtgtccggagttcgttccttctaatgtttggacgtgttgggagtttttttccttctggtgggttggtggtctcgctggctcaggagtgaagttacagaccttcgcggtgttacagctcttaaggcagcgcgtctggaggagttgttcctcctggtctcgcggttcaggagtgaacctgcagaccttcgcggtgagcgttacagctcataaaagcagtgtagacccaaacagcgaccagacttactacaaacagcacaaacaaacaaacaaaaaatacaaagaacaaaacaaaaaaacaacacgcacacacgtgttccagcttgttgtttctgcgacctcgggcagcctgcttttattctcttatctggccccacccacatactgctgattggtccatcttacagagagctgactggtccgttttacagagagctgattggtctgttttcacagggtgctgattggtgcatttacaatccctgagctagacacaaaagttctctatgtccccactagactagctagatacggagtgtggacacaaaggttctccaagtccccaccagagtagctagatacagagtggattggtgcattcacaaaccctgagctagacacagggtgctgattggtgtgtttacaaaccttgagctagatacagagtgccgattggtgtatttacaatcccttagctagacataaaggttctccaagtccccaccagactcaggagcccacctggcttcacccacccggtgggtgggtcccgcagcaggccgcacgtggagctgcctgccagtcccgcgccatgcgcccgcactcctcagctcttgggtggtcgattggactgggcgccttggagcagggggcagcgctcgtcggggaggctcgggccgcacaggagcccacggagcgggggtggggaggctcaggcacggcaggctgcaggtcccgagccctgccccacgggaaggcagctaaggcccggcgagaaattgagcacagcagctgctggcccaggtactaagcccctcactgcccgggccgggggcgccggccagccgctccgagtgcggggtccgccgagcccacgcccacccggaactcacgctggccagcaagcaccgcgcgcagcccctgttcccgctcgcgcctctccctccacacctccccgcaagctgagggtgccggctccggccttggccagcgcagaaaggggctcccgcagtgcagcggcgggctgaagggcttctcaagcaaggccagagtgggcgccaaggccgaggaggcgccgagagctgccggcacgctgtcacctctcaacgagatgtgctggggggcagagctggggttgtgagaccaccaaaatgcatgccagttcctgacgcagtgttaccgagtgaaagggctcgctgccccatgcactagaagccgatactatggcaccaggtttttgagaaaacgaaagcttgttatcgcagttcgaccaacaaggagacagaagtccagctcaaatcttt[132 bp omitted]gctaacacggtgaaaccccatctctactaaaaaatacaaaaaaattagtggtggcagacgcctgtattcccagctactcgggaggctgacgcag[136 bp omitted]taggtgattagtggaagggaaggaaaggtctggaaagtcctcgggcctccacagtggtatcttcatgcctcttcatgggtcataggtgcaaatttggggggcgctagtgtgaaaggtgcagtggaaaggctgtgaggtcagcgggctcattctgcatagactccagctggccatatggattccaactgatttcagccagtttttttaatctcataagcagaggaagtttcagcatttcagcaagaggtttcttttcttatctgccatcctgcaaacttaagaatttctgttagtcattggtttctttctctttggggcatagtttcaacagagtcctgaaaaagctcaaaaattgaaggcaccaattacctctgaatgcacagacatagagtaagattggacacagaaaatcagctgaaaatagctaaaggcagcagttagacccccagatctctttccccaatctgcacagccaggaaa[138 bp omitted]tggtggaaccctgtttctactaaaaatacaaaaattaggcaggcatggtggcgggcgcctatagtcccagctactcgggaggc[137 bp omitted]tggggaaaccaggcacagctgagtgtcaggttgcaattctatgctgaaaacaacatactggacagggggattccccgcccccacacacccaagcttcctggacaccagcagcctggcttacaccctctgagtcagagataagagatctggggagactgagcataaccaacagacatggcctagagatgctggcatctggcatccccatcacccccagcaaagtcctctagttgaaaagttccagtaatgcacacagtttccaatgagctcacagggccttactttaactatgacagccaagcaccaccagatatttaaggaaagctcccactgtgaaataaagagaccagacagaaagggaacttggagaaaagacagataagagcgtgcagaggaaaactttttcaaaatattatcgtaatgtacaaagagagataagagaagatattgcagccatgaagcaagaacaggaacctatttactacagcaacaaaaagaacattcggattataaggaatctaaacactaaacacttggaaatcaaaacttgatagcagaaattaaaatttcaaaagaaggattggaggaaaagttgatgaaacatcccagaaaaaaagacaaagacatagaaatcaagaaagaaaaagtaagtaaaattagaaagtaagtccaaaactcaacatccaaacaatagaatttcccgaataagaaaaaaatgtgaggaaaacatttaacataaacaagaaaattttctagacctgaggacatattattagttccaggttgatacaacccaccaagtgccaacaaaatgaacataaacagacctggacccacgcatagcactgcacaatttcagaaagctggggacaaagagcaaaatcctaaaagcttccagagagaaaaaaaaaaaaaaaaaaaaaaaacattgcttacatacaaaatgacaaaatgagccaaaacgacctcaaactttttttttttttttttgagagaaagtctcactctgtcacccaggcttcagtgcagtggcacacacatggctcactgcaacctcaacctcctgggctcaagcaatcctcctgcctcagcctcccgagtaactgggaccacagacgtgccccaacatagtcagataattttttaaatttttatagagatagaatcttgccatgttgcccagactggtctcgaactcctgtgctcaggcaatcctcaggcctctgcctcccaaggcgctggggttataggcgtgagccaccgggcccatcaaattcttaatggcaacattggaaaacagaagaaatgacaaaatgtctacaggattttgagggaaaagaatttctgatccttgtacctggccaaattgtcaaataaacatgatgataaagttattttcagaaatgcaaggagtaaacccttttacctcctacacacccgttcttaagaagctgttggaggatgtggtccactgaaataaagaaataagccaagaaagaggaacgtatgggatccaggaaacagaaaggcaaaaggaaattcccaaggatgaggaagagaagttcagaataaaataagaggaacagtcagtccagagtgcagcacgaagtatatctccaagaataaatgaccgaatgaacgaa[169 bp omitted]aaaaattagccgggtgtggtggcaggcacctgtagtcccagctactcaggaggctgatacaggaatcgcttgaacccaggaggcagaggttgcagtgagccgagatcacaccactgcactccagcctgggtgacagagtgagactccgtctcaaaaaaataagggccttctgtgttgttacaagagcaactgtatcccctgttcagcgtgacccacaagtttaggagtctttttcagtgcccacattcagtactctgcagaaactgaagaaataatccaagcaataaaactaagctggaattttgttttccgggtttttgtttttgttgctgctgttgttcttgcattccagtggtcaaaggccccactcttgatgagcgtgtggtcagatgagaacagagagaggactagtgggatccaaccatctgctaacctgtcaattctgccacaacctgcaccttatctttgcctgacaatatacagcattcttgttcaacaggcatccttttagataaaagttgtaaatttcctgtcagttgggattatttttgcttttgactggagagacacaaaaatgtgaggccaggcgcggtggctcatgcctgtaatcccagcactttgggaggccaaggcgggcagatcacctgaggttgggagttcgagaccagcctgaccaacatggaagaaacccctgtctctactaaaaatacaaaattagccgggcatggtagcgcttgcctgtaattaatcccagctactcaggaggctgaggcaggagaatcgcttaaacccaggaggcagaggttgcggtgaaccaagatcgtgctccagcctgggcaacaagagaaaaactccatctcaaaaacgtttggaattcaagaccagcctggccaagatgataaaaccccgtctctactaaaaaatacaaaaattagccaggtgtggtgatgtgcacctgtaatcccagctacttgggaggctgaggcaggagaatcacttgaacctgggaggcggaggttgcagtgagccgagatcccaccactgcactccagcctgggtgacagagcaaaactccatctcaaaaaaaacaaaaacaaaaaaaaggctttaacggctaagtagaagttagcacaggtggtccatgctatagagattcagctaagggccatgaatagatacatgtagggatcagggaaggaatgagcttagggatgggataagggacagagttcgtgtcagggatgggacctgtgaattggtgacataggaagctgaaattcacaaacagctataaaagacattaatgggaaaattcacatatggacaacatattagataacagtattctctcatttgttaaaattcttgactgataattgtatcgtgattgtgtaagagaatgtcctcaatcttgggaaatactatataaatattcaggagtatattagtgtttaagaataaggtatgatggtgc[357 bp omitted]aaagaaaaagaaaactcagatatcaagaaagtgaatgtggcaaactttaatatttggttagtctaagttcagggtagctgttgaactgctattgttatcttttctacagatctgaaaatgtttggggaataaatgaagttctagatgtttgtcagctgaaatactagtttgctatagtataaaggtcaaaatgtcccgctttttgtctccagccacgtaggattggtagagctccccaaccttcttctagccagaatacctgcccctcagactgtccaaaacacaggcactactctccaaacccttctgatacctttatatcttcccaccacactcaacccctttatggacctggcagctctctcttggggcacccatttgtactctattacctaacaatttcccttcattgtatttatccatttacctttctctttctcgggagactgagagacccctggagacagtgactgtgtagttttcatttttatctccaacatctagcacaacatgtggcctacaggaagtactatatgcatgttgcggaaggaacaagtgaatgaaaggcttgctgggtggaaaagcagacagtgtagttgcagtacgacaaatgaggccgggtgcggtggctcacgcctgtaatcccaacactttgggaggccaaggagggtggatcgactgaggtcgggagttcgagaccagcctgaccaacgtggagaaaccccatctctactaaaaatacaaaattagctgggcatggtagcacatgcctgtaatcccagcaactcgggaggctgaggcaggagaatcgcttgaacccgggaggcggaggttgcggtgagctgagatcgcgcgccaccgtactgtaccctaggcaacaagagcgaaactctgtctaaaaaaaaaaaaagacaaatgaaagcagggctggttggcaggaactgaactggtcagagtgtaaatgagtgcaggttcttagtgttcaagacccaaaagtgtggcttcagcaccatgtttcacaggagaggctgagaaaccaaagacatgggagacttcagggagttagatgtccgaaaggtgaagaaatctggggcaacacttagttcaagtgttgggaaacattagaacagcatgagataaggcagaccaagggtctttgcaaaggactgaaaacgagaagaaacctcttgagctctggatcccatgcgggagcatttccttgacttcgtgtgcacaaatatctctttatgccgagtcttttgccaggaaccacatggagaaaagaaggcctaacacacaacccttgtccagggggtctacagataagttgctatttagggaaatccactgggcagtttgtagggaggtcactcatccagtatttgaaaacagatttgcactggacccagacaggtcaaagactagaagtggaagtgacccaggccccgggactgaggatccatgagaccccacagtgacaaagtcctaagaatggcaccctgtgggctccctaggatctgtgccctgagaactgcccctcaaagtctccttggcttgcaaggggtgaagtggggggagggtgtgccatgctaggggtgccctaccaccccagcccattcttttttgttgcattcagtcaaaagggagcaggctgcaacagacggtgtgagaggaacccgagcagctaagctcccatcagaactcagtttctcaatctgctccagcaatgcacatccaccccgctggagagggagcctccccgggttcttgcagagcttatcctactgcaggtgatggtttgcttatctcccacgttcagctcaaagaactgaggaggaaccacaattagacattcgtttgttcattggttcattcattcattcgttactgagccccttctacataacaggaatttggaactggggatgcagcaacagacaaaccaacaatgtctctgctctaatggtgtttacattctattgcgaggagaccaactaaatattcaaaaatatatatcatatatatcaggtggggggtgggggaagcaggagctaatgaggggagatggaggcaagaggggagttttagacaggatggccagttaaggcttctgaagagaaagcatcaaacctctgcctctgttggggtggccagggcccagaagcctgagatcttggagctctgcctctctgtccctgcagactgagaaggaaccatagagaggctgaggagcagctgctccctggccgacagaaaccattcaaagaacataccattcaggaaccaagtagggcaggcgcctgggttgccacagtccctgtgctgaggtgtgagtggcggcggagcagggccggcacctcaccgcaccatcttctctccttccttcacgaggtcttactcttccccagatccaatggacatttctcaacagcacgatgttttctatgttttctgcctcctgtttgaagttcttttctgggacatggccttctccaagtcctcttcacgctccttaaaggggctcctcttgcccctaaaatgtggtgtgatgtggttccacttaagcccacgtctctttccactccagtcatcctccctgggtgacctgccccctcccaaatcttctccagccctgaaccctgtcctcaactacacacctcacatatccagctgcttcttaccccagaggtactgctcattcaaatgttctacattattgtcagcatgtgaattcccttggagcagcatcttggataatatgcatttccccaatgcctggtgccctggcttgtgcaccataagtattcaataaatgcttgtttaaatctttcttcctttccctttcccaaccccaaactactcctatcttggctacaggcccttcatttgggggatgatctttagtttccagctacctactctcccaaagccccgtctctagggaagcagaagcaacaaggatactgagtgtgacgagagaaggctaaaggccggggctaggcagccggttctttcaggggaaaagcatgaagactgagagactgttcagtcctgccagcctttggcaagagtaccagaaaccgaagcactcctatgtggcagccaagcccgggacgacaggccaaagggcactctgacagggcagcaccacctccccatccctgcccttgggtcctaaccgaagccagactgcaccagcctccacgtggacctgtgtaaatctcctctctgctctcccaggtccaactctcctccacagcctgccaaagctggtcaaaaagaggagtcacttccctcaaggatgaactgtaaaggaatgcctgccacttagaacacggcccaagttcctgagcacagctttcgaggctctcaccacctgacccccgtaaacctggccagccacatcctcatgcctcctttcctgcatcacctgctccagcgaactaaagcagcaaggtgccctgaaggtctccacccatctctgaacccccctatttctgctaagccattatctttctcctgcacttaacacaactgaggggctcaaagacagagccatagtctataaaccctgtgaaatttcaccatgcaactttttgaaaatccttgtcagacaattccaaatagacgctagccatccaattgtgtcccatgcacccgtgcaaatttaataaacagatctacacccaagctacttgcagtggtttttggttttgagaatgggtctcccggtgttgcccatgttggtctcaaattcctgggctcaagcgatcctcttgcctcagcctcccaaggatctgggacttcaagcatgcaccactgcacccaagaaaccttctccaggataaccctgatctattatcctttgagtatgattattaactgaagaatttaactatcctaacattcagccaaccctgtcctcgagcacagggctgtgcttgtcatagactcttgaagagcctgtggaagtcaatatcctgcccgtatttccccaactagcaattccaaaacccaggactagtctgacaggctctgtttggaactgcagacccattctggcccctaccaattgttttcttccctagatcaagccaaaacacacctgaataacctgctcttcctcccagatattggaacatatcatgaaaccacaataaatatgtgcacacaggcagatcgatggaataaaacacaaggccgaaaataaatccaaatacacataggaatttagaatataatgagaggtgtttcaaatcatgaaagggtattttgtttactaaatgacattagtacaaaactgtaaagttagatttgtacctcatgccttacgctaagataaacaaattccaaatggatgaaagctttgcatgggaatactaaaaccgtaaaagcattaggattgtgaaagcattcacgcattgtaagtgcttattagcatctataagacgtcaggaaaaaaatgtgagaacattccaataatcttcaaagccctttaaaaaaatactgtccaaaatccaggagcttttaaagaataaattcaactaatgaaaattaaattttcagcatggcaaaaaaacaaacccactaaaagtcaagagaaaaacaaactccttaaaaaaatgcaactcttattacaaagagccaatgttcctaatatacagagctatgaactgagaaaacaaaatcaacttaataggcaaaggatatgaacatttcacaaaaaaaaaaaggaaattcaaagagttgttttttgttttttgtttttatggagtcttgctctgtcacccaggctggagtgcagtggtgtgatctcagctcactgcaacctctgcctcccgggttcaagcgattctcctgcctcagcctaccaagtagctgggattacaggcacccaccatcatgcctggctaatttttgtagagacagggtttcaccatgttggccaggctggcaaagagatcttaaacacataaaaagaggctcaaactctctcacaagaaaaatgtaaattaaaacacattaatgtgccaatttccatttaacatattggcaaagatcacaaagttaactgtgaacaacacactttggcaaaggttcggggaaacacccatactcctggtgggagcaaaaattgatacaacatccacgaaagaactcagcatttctgcttcttggaattcattctacaaatactcacttatgtgaagaatgacatgtccacgtggcattttatacaaatatatgtctgttttgtggcagcaagagagaaagcatcaacctaaatattcatcatcggggactagtttaaaacattatgatacaatgagattctaggcagctgtcaaaagagaatgaggaagctctgtatgaacagaaatggaatgatcttcaaattctgccaactccaccttcaaaaattatctagaatccaaccacttctccaacaccttagtggaaggtatcatctcttctagctgaatctgcttcctagctggtgtctctactaccctttcttttgtctgttccccaggagcagtcacacgggttccattacaacataaattatgtgacatcaattatcggcttaaacccctccagtggcttcccacctcaccaagtagaaaccataggccctgcctcactgcccccccatcccccagccatcctctttcaccctattattactctgacctcattcccttttccaacctcactggcctccttgctttccttgaacacaccaagaatgctcctgcttcaggatccttgtacttgctgtgcctgggccccagaactccacacagctctctctcaactctttagggtctttagagtctttattcaacatcaccttctcagcaagagcttcctcgaccattgtaattaaaattgcacacacacacacacacacacacacacacacatgtagtaacatggtagacatgggtgttctgggtgtaattctttcaacttctccgaatgttcaaaaattttcattataaaatattgaaaacaggctgggcgcggtggctcacacctataatcccagcactttgggaggctgaggcaggcggatcacgaggtcaggagttcaagaccagcctggccaacatgatgaaacctcatttctactaaaaatacaaaaagtagccgggcgtggtggtgcatgcccggctactcagctactcaggaggctgaggcaggagaagtgcttgaacccaggaggcagaggtgcagtgagccgagattataacgctgcactccagcctggggcaagactccatcttgaaaactaaataagttaaaatttaaaaattcaaaatactgaaaacaatacacccacacgaatctatccctttccttgctttattttcccactgtgctcaccatcaaatatacatcttacttatttgtctaccccccacccccaaaatatctagaatatagatcccacaagggcagggcagagatttctgcattttgttcactgctgtatctccagctttgtaaaacagtgcctatcaatgactaccaacatcaaatttatggttttactgtaataatgtaagatgtaaccactggaggaaactggctgaaggacagcttgtcatccctaccctctcattagcatctctgcaacctcctgtggacctatagttacatacattatatatatacacatacatacatatatatacacacatacatatagatacatacatgcatatacacacatacatatatatacacacacacatatatacacacatatatatatacacatatatatacacacatatatatatacacacacatatatatatacacacacacacatatatatatatatcacacatatatatatatatatatatatatatatatatattttttttttttagacgaaatctcactctgttgcccaggctggagtgcagtggcgcgatctcggctcactgcaatttccgcctcctgggttcaagcaattctcctgtctcagcctcccgagtagctgagattac[132 bp omitted]cctcctgagcagctgggactacaggtgcctgccaccacacccagctaattttttgcattttttagtagagacagcctctgatttatgttacgtgataatatactaccatttgcatttaaaattatatatatatttgtatgtgcatacaatatctccagatgaatatgcaaaaactgatcatactggctgctctggcagaaaatctcatggctaaagaggacttttcaacaaaccttttgtacctcttgagttttgaaccatgtggatgttttcccgatccagaacaccattcaaatgagaaaaaattctgttctagcctcttccccaaaatcaatgtcaacttcacctatctagtttccagaaatcaggttctttccctttctgaaaaaccactattgcacttttcacactacacccttgtccttgcagtgatccttaaaccttccagggccttctccacctagaagaaattcctcttgaactcagaggaggaaaaaaaaaaaaaaaagctattaagacagtttaggaattaataggaaaattttaatatcacaattatcactggattactgttatttttcttaggtttgataatggtatcaggattgtgcagaaaaacattcttatcttagaagataattcatgttaaagaatctgggatgggaagggccacggtgtctacagcttactttcacgtggtcccatgaaaaaagaaatgtgtataactacagatgtatagattagacagatatatgggtgtaatatagatacatgtctacatgtagatacgcagtttatagggataagagttaacatgactaaatgttaattggcaaatctaggcaaaggttatctattatactgttctcacttttctgtttatttcgaaaacaagttgaggggtaactttttaaaatcctactgaagtttccaaaaattagctcaaatgccacctcctcaaagggctcttcaggatacatgttgggagaaatgactccctcttctgcattgcgaaggcactttacttacgttcatgattcaactgactgagcaaaaaaaaccacggggcccctagttcaagcccaccaatcttggtaccctctcacagacacatctctcggttcatcctcacacgtccatcccagcaaggcctagaataggattagtgcttaaagaaaagacactgggacagtcaggtgcggtgtctcatgcttgtgatcccagcactttgggagtccaaggcaggtggaccatgagctcaggagttcaagaccagcctggccaacatggtgaaaccccacctctactaaaaatacaaaaattagccaggcagtggcaggcgcctgtaatcccagctactcaggaggctgaggcagagaattgcttgaacctgggaggcagaggttgcagtgagctgagaccatgccactgcactccagcctgggcgacagagcaggagtccatctcaaaaaaaaaaagaaaagaaaagacactgggtgggaaatatccacacctcaagagtgagcaggaaggcctggggtgagcttatcaaactcctgccagggagctgtgaggggaactgtcattaggaggactagccccaaaacagaggtcattcccaacgtacccactacggacaccctttcatcttggggtaaggtccaaatttcccagaattcaatgactaaactgctccacaccttttcctaatttcctaaacttccatagactgagcaatcactcagcctgccctttcagaccaaggggctgagcacgcatgcgtgtgggcatgtgggtgttgacacaggtccactcactaggatgcattctccacacatttcccaccccgaatacaaacacgaaagcagggctgtgtctctataactcctcattcttaaccctacacacaattctgcacgtttagcatccagccagaatcctacaattctgacaccatcgtgctgagtgatgggacagtccattacaccaatgtcagttgttcctctctggatcgtcaaaaagaggacagctatggagacatctggggaatactatggacaccctgaaaagcccagcagacacttgagcttctggctggggacccaggtgtggcaaaaggcagaagcagcagtcgctatctaaggacataactttattggaaacaaagagtggggtgcagaagatggctaggagtcaggctctgtgggaggtggtggcttctcatcatcagggggacaatcgatgaagtcggccagcatggcagctgtgtcatcctgctccttttaggcacaaagatacaagattcagaatagtcacacacacatacacagaagaatggttcaggctgggcaaacctctcctaagagaagcagctgccaccccttctcccgccagccccaccttctcgcccaaggaaccttccctgcctggcctctcaccttttcctggagagcttcggcctctgtctctgtctccatctcttcttctgcaggtgtctctggtgggggctgcaccttgtcactcccatcctcagtctcctcttccaacagggttgggggagcagagggctcttcttcaacaagctcctggggagggggccctgccgcagggctttccccttccctctccacctctccctgggaggggagcgcttcaggggccagggtgggagctgtgtcagccccacgctcctcctccgtccctggctcctccacttccaaaagcagcccgggttcaggttcgggttctggctgcacctttgggggagactcagggggaggcagagctggaggcagggttgggggtggaggtgcaccttcttctacctcccctcctgctgtgccaaactccaggtcttccacctcttccagttcttcttcctcctcctcatcctcctcttcttcttcttcctctaactcaccttcttcttcctcaaattcttcctcaaactcttcttcctcctcttcttcctcttcaaaatattcctcttcatcctcttcctcttcctcaaagtcttcctcctcttcctcttcttcctcttcttcttcttcctcttcttcctcttcctcctcctcttcatcactgctgttgatattaataactgtcaaatcctcttccagggctgggggtcctcccccaccaggagtcccttcagggaccaactggggtggagggagcgtcacaggaccaggaacaggcggcggcggaggtgggggtggcgggagaggccctggggctgcaggaagttcttcaggctcctccttcgctggcacaggaggggaggctgttggtggcccagtgggggctatagggggtggtgtggcacctgagggtggtgggggtggcagggggggaagcccctcgggcacgatcaccacgctgtcatcagagtcactttccaaggagatctccacatcagatgcctcctccttgtcatagtggacaaaggctggtctgggcactctccccccaaaagtttcatctgggggtatagtaggtgggggagtcccactaggggcaaggatggggtcctcatttgagcctgcccggtggttctcagggccaggaagaagccggggagggacagacactaggcctgggacagaaaggcctaggtggttggctgtggtgggaggtccagggcgtgccgagggcacagggcctgctgagggcatggggcctgctgaaggcatggggcctgctgagggcatggagcccactgagggcatggggcccggaggatggaacggtggggccctgaagggcgatggggcctcaggagggggaactggagcaggtgtggggcaggtggggcccatgggctgcaggggaggaacccgggggtgggtcagagcagcacaggtcaccagtgcttctgagcagaaagaggagacctgaggaaagaagaaagggcaagtgtgagcaccagaaatactgggagtctcttggaaacaagagactccaggaaccaaagaggggcttggcccatcacagttacctcaaggctatcttctcgctggccgagggagaaggcttgcagggcacaggcaagaggaggtgggcagcgaggagacggggccagcagcagcgccagcagcaggcagtagagttcacggcggcagcgggagctcgtgtacggggagctgcctaggacctcaccctgctgtacacccatgaccagggggaggaccaggtcatgcagtctctgaaaaggacagagcacacctggaaacatccccaagaccacccaacccttctccagagcctactcccaggtcggaatggacccacctctgggccacaccccccaatgtgtacagagcaggggccccttcccctatctccacggagacgaggctccactaaccctgtgagtctcctccttgatgagaggcccacacatgaggatggtccggctgaggcctggggaagaagaatggtgtgtaaagggtaggctcccaacagactgacggcaagggcttctgaagcatacagcccaaaatgggcatcaactctgccactgcctatcttggccaagtcatttaacttctcaactagaaaatggggatcataaaagtacctctactgtatagggccactgacggtatttaattgagacaatgtaagtaaaaaattataaattttataattttgcatttatatatttgggaacaatcggttctccccttcccatgggatggggtggcaggcagtgaaatatatgggacccagaggaaaggcatccattaactgcacagtatccgactagcaacctgtggacaggtcagtggttacggtgagagcagggagctcccccaggcagcctgcccttggaagaatgtcagcttcacagggaggagccttccccgcatgctggaactctgcctgatagaaagtggatacaccaaggacgtgctgaacgccggaggaagcgaaggccttggaggggctgtgtcggctaccagagctcccggtctaaccgcaggacccgaggccgcctgcagccctggcaacagggcggctgcttgggtgcctcctcctggcctctctgcgggcttccgcctggctctgcatttcacaggcaccttccccttcacctgctgtttgggggatcacttatcgcagtggacgaaggctggtctaggcactctccccacaaaagtttcacctaagggtatagtaggtaggggagtcccactaggggaaaggatggggtcccgtttgagccccagtggtccagggcacaggcctcacccacctctgagtgcagccgcacacacgtcgctgttggcattgctatcccctttccggtggcttggcggggccatagcttcccccacatccagctttagcttcttgggggcgctaggcttcccagtctgcaaactcccatcagggctcccccgcgggctacgcagctggaggcagagaaaacataaatcacatccacaggcaaacaacaaggcaagacagccacagcagacagtgtttcctgagcaggcacacttggtcaaagggcacaggatgagtcctaaggcggagctgaggcctcctcaccttaagggcatcagctggcggggagatgtcgctgagcaggtgggtgagcagggcctctccagaggctcctccctgaagcattcccgccgaggccccacaaacctgcacccacagctctaatatcgcatacaccttggtccgaaccgtgctgtgtcatgagcaaagatggcagttatgaatggggggtcaacatgccagaagccccagcccacctgcaccccctcacccccctctcctctttattcccttcctgccttcctggatggtcacctgtaaggcctctcctggcctggagagagggaatctctaccgatgctccaggaattgaggacctggggaagcaggcggccgatcaggatcccaaagcgcaagagccggcttccacacctggggcagagaaggaatggtgaccctcgtttctggcacgccctatcccttcaccacagccagcccaatcccactcacgcgaggatgagtgcagacagcaggtccaaggcctcaaggtggatagagggcagcagcagcagccgcaggggaccatctccatgcaagctctggagaaaaaaggggcagagataaagagtggaggaagaaagtgagagccagagagagacagaaacagggaatgaccatttacatatgtacacataggtaagaaacccaacccctgatctcagctctcccaacaaaatcaaacccctatcctctaaaatagaccctggatggaaggtaagaaggatggctgggcctctcagcaatgactcagctgatccccaaattcaccctcccccaaggaagcatttgctacactctgacactgtgctcctgtgtcacgacacataggaagtgatgttatttggacaaaagtaggaagctctctgggacgactccaggatgacactgtttggggagactcaggtccccagtactttcctggttgcctggtatcctgagcaagggctctgaagagatgacaaatcccacttacaatattcttgctactgacgctgagggtccggcagatgaaatccaggatttcctgcacagggacggacacgggagctccaaactcagagctaaagagaatcagagcagggagaccttcagagcaggctccctggcataactcccacacccaccttcatctcctttctcctgatgaaggcgacactccctcatcaatccctcctgctccacgcctccgctccctccaatacccacacacacctgagcatgagccctaggcagcgggccagtcccgaaaacctctgccgaagctggagaaggacatgggcatcaccatcttctgaggacagcagcatctccaccccagggccttcattctgcacaggagctggcagaagcacaactaccctgtacactgtctttcttccatcccctcctctgtcatttctggtggacgacctgcctgtattctaacccattttccccaaaaaccaactgccccatgtctctgggctcccctcctgttccttcctgccacgcttcctcactattgttccactaactagcagccctggtccctaccagtctctgctccctcgtacagggcccccagcagggtgtgcagtgaggccagcagactgtgtagctcctgctcccagctctcggtgtgcttcaggccttgggaaaagccagcccctaaagagggcagccgggaataacactcacaggccaactgcgggagaaaggacagaaacctggtcagatgggaatccagcccagccacagaacccccagccccactgacacccaaaagagatggagatcagagagagctctgagggaaacctgagatgggacaatgaggccgaaggacacagatgggcatatgaaggcaggacagaaaagctagaggaggagcagcaagagacaatccaggctcagatccccgggctctccctctccctccctgccctttacctgttggagctgagggctcaaggcatccaccctagacagaaaaaatgaggccagcttgccctggatgtggaggaaaaaaggaagaggccagtgagccagctctgagagccagagatgtacatcccatccgttcccagcagcagactctaagcccaggtctctttttcctgtagacacaagaagcaaagccctctatggggcatcaacaccgggcacggacatgctttcatggtaaaagactcctcaacgccagctctggtcctcggcttcctgcttgggagcgaaaagggcctggccctgtcccagagacagctgggcttcctccttgacagtttttgcaaaatttttccctcaagccaaaaggacatagtactaaaaaacagtctccacactccaactctctaccagctcacacacaaaaacgagggtccaagctggaagttaagacactaaccagaggtatgagggcaggacaaggtcaaaaaagaaggctgctagagcagaagtaaggcagcaagtctcggagtagcaatctgtcattcggcactttctctgcctgctgtgtgaaggtgctagggcaggagtgtttaacctgagaaccacaatttagttggatatacaatcatagggggcctgtgatcatggatggggaaaaaaattactcccactagcctatttgtaaaatgtagtgtttccttcacttataaatgcagacaaatagccacagtagtatcagcagtacctgtgactgtcactaatagaatcattttcatgtcacattataattgtaacacatcctgaaatatcattcacatgcatcactaatttgcaattatagtcgttgtaagacctgcttctagatcttattacttaacatgtcaataaaaaagcacaggctgggtgcagtagctcacgcctgtaatccaggcactttgggaggtcaaggcaggcggatcacttgagccaaggagtttgagaccagtctgggcaacatggagaaaccctatctctactaaaaatacaaaaacttagccgggtgtggtggcgcatgcctgtagtcccagctacttgggaggctgaggtgggaggaccacccaagcccagaaccgagatcatgccagtcagtgtactctagcctgggtgatgagagtgagaccctgtctcaaaaagaaaaaaaaaaaggccaggcacggtggctcatacctgtaatcccagcactttgggaggctgaggtgagcagatcacgaggtcaggagttcaagaccagcctggccaacatggtgaaaccccatctctactaaaagtacaaaaattagctgggcacagtggtgggcacctgtaatcccagctacttgggaggctgaggcaggagaattgcttgaacccaggaggcggaggttgcagtgagccgagatcacgccactgcactctagcctgggtgacagagcaagactctgtctcagaaaaaaaaaagaattagtaaggataacaagacaagcatatggaaaaacaagaatctggagccaacactggcaacatacagagaaggggaaagagcaggctcacgctttccccgagacatcctagtggtgcacacctgtagtcctagctacttgggagactgacgtgggaggatcacttgagcccaggagttcaaggttacagtgagctacaatcttaacactgcactcctgggtcacagagcgagaccctatctccaaaaacggctcaaaaagctggactgaagccaacagaagtctgcttatgtgactgcaataaagcagtgtacggtgaagcgacacggctctaaccacaggttaccctggctgacccacaaagcaaaccaaagcaatgactcgcttggaacagttcactcaaaacgcgcacacacacagcatgtcctggggctctctcaagagtaggtcagtcttcccacccattccgaggaactgctcatcaatgtggcaaggacgaggaagtgagttcaagtctctgcaggaattgacctcatggactcagaatgcttgattcacattacttgggagtagtaatcctgagcttggagtctacaattaccctgagagtatccggggaatgtaacagaaaacacagacacttcaaaacggcagttatcagttttcctaagtactagtctgcgagattttccaagtgcaaattgcccctggagcctctgcatgacagattcttatctgaagtgctggcaaccgacaaagccaaaaccctcaacaccctcaacagagggaagttctccagatgaccttttttttttttgagacagggtctcactctgttacccaggctagagtgcagtgccacgatctcagctcactgcaccctctgcctcccagcttcaggggatctcctgcctcaatgttctaagtagctggaaccacaggcacacaccaccacacccagctaatttttttgtatttttggtagaggtagggtttcaccatgttggccaggctgatctcaaactcctggcagatggcacttgattcttagggaaataaaggtaagacactccctggaaggacacaggaacatttgttagtttggaaagggtactcaaaatgcaggccttaagttcaactgtctgacaaaaggttgagaattacagataaattctcctgactactcacactgaaaataaaaaagcaacagcagaagaacacttagcattctagtctccttaactcttactattcacacttctatcctgttaagtaacactcaatttcccctccactttcatgggggatgcaggtagataaagataatacctaacagagctgaatcaaaatacacttttgcagtaaaaccaaacctttgttcagggacaaactgctggcctgtgtcatttgagaggttaacttacagaacatttgacaagataaccagtttttactaaacttagtaaaacctcagtaaataacctctgctaatctttaataaaatcgatgagtcactccaaataccttcttgacaaaatgtcctgccctgcctacccaaagattctattagctgtgattagaggcattcacatgaaaagaaggaaccagcaaggacacaacccctcgctcactcagaactagcatctgctcaggcacttttcagatactgcgagtaaccagttactaacgacactgcaggcatcactccctgatcacagcgctcaggccgatggaactctgactcacagtccttcccaggccagcgagctacacagccactaacaattgactagagctgctacctgccctggttttacaattaccagataatataacctttggttacgtcacttaagtccctctcagctggttttctcctctgtaaaatgcagtgatacaaattccacagaataattacaatgataaaatgacacaacacatcttagacactcaggagagtgaatggcacagtgggcacccactaaagaccagttccctttccctccaagaacttactttcttgctttggtcacagaaccacattaatctcattttctttctttttttggagacagagtctcactctgtcacccaggctggagtacagtggtgcgatctcggctcatggcaacctccgcctcctgggtccaagcaattctcctgcctcggcctcccaagtaactgggactacaggcacacaccgccacgcctggctaattttttgtattttagtagaggcgaggtttcactgtgttgcccaggctggtctcaaactcctgagctcatgcaatctgcccgccttggcctctcaaagtgctgggattacaggcatgagccaccacgcccagcctcataatctcactttcaagacaacctgaatagcaaactcccccttaactaacaatactaatggcaaatacagttaactccaccagttaaacaaaaaattactaatttgccacaaattccagctctctagagatttgtgtttccatctgagtaagcaggtgtccgatcgtttgtcaaaccaatggtgaatataacaaaataagagaacatttaatctacaggggaatacctacttgttcttaggtatagttggcatccaattatactgcaaacaacaaatgtgccaattacgaatggccctttaactgtgactgcttaggcagaatttgtaaaccattcatgtttgttattgtatctccctaaaaacaacactgtaattcttctcctgacctcctccatcatctgacccacatacaccctgacctgcctgtctgacctactaaggctcttttgtagtcaccttgtatgtgtcatgacaactgggaggaaggggtcaggaagcgacagagggagtttaaacaggaatatacacagaaagaagtgttagggcaattgtcctagggaagtgatatgtcagaaagcattcccagagaaaattacaagaccttcaagaataaagtaaaggctgggtgcacaggtggctcatgcctgtaatcccaacactttgggaggccgaggcgggaggatcacgtggggccaggagttcaagaccagcctggccaacatagtgatacctcgtctctacaacaaatataaaaattagctgggcgtggtggcatatgtcagtaatcccagctacttgcatacatctgtaatcccagctactcggaggctaaggcatgagaatcacttggaacctgggaggtggagcttgcagtgagccgatatcacaccactgcactccagtctgggcgacagagactctctcaaaaaaaaataaaatggccaggcgcagtagctaatgcctgtaatcccagcattttgggaggtcaaggcgggcggatcacaaagtcaagagatcgagaccatcctggccaacatgatgaaaccccatctctactaaaaatacaaaaattagctgggcgtagtggtatgcacctgcagtcccagctactcgggaggctgaggcaggacaattgcttgaacccgggaggcagaggttgcagtgagccaagatcacgccactgcactccagcctggcaacagagtgagactccatctcaaacaaaattaataaaataagatatgatgtgaattggttgaacgttaaaaatttaaaaaaaaaatgaataaagtaagatagggggccaggcacagtggctcacacttataatcccagcactttgagaagctgaggcaggaggatcacttgaggtcaggagttcaagaccagcctgggtaacatggcgagacccccctacaaaaaatttaataattagctgggcgtggtggcacacgccttagtcccagctacttgggaggctgaggtgggagaattgcttgagcccaggaggtcaaggctacagtgagccaagtgtgtgccactgcaccccagcctggacaacagagtaagaccctgtctcaaaaaaaagacaaggtggtagaaaagtgggtagggcattttaagagatacagaaaaggcaaggcagaaaaaggaaggagcccatggttcagagtctggcttaggcatcaaacagatacaggttccagtgcctgctgatcttagcaagttcttgattccaacttctttggaaaaacgagggttaaatgaggtaagtgctacaaagtggtagaagtgtacttgtggagataggtaactttaaaggataatcagaagataggtgcttaggaatctcaggacaggaatctgaggtaagagctctcaacgcttacactggtggggagaagagtgcataaatacttactttgagagaaccacaagcccgagggaaataggtcatacaagccttcattccttccaatgctgactgctcacactgtaggaaaaacaaagggagaaacgagaggctgcgagcaccatgtcaccatattccatctcccccagcaccccacaagggcccttctccagaaatcactttttcttggcccctccctcttctcacttcttcaatcctattccccagtcacttccatcaaacaattaaacagtgtgtgaaggtgaggactgcggggggccatggggaagggtccagggagacatctcacctctggcctgaggcccagcagggaggtgagaaggccagggaggtggttcatggagatgtcccggaacagtgcaggcagctgggctgcatatcggaggaggtccctcaggacagccacggccagctccattgtggcaggcgggtcctgggtctaaagaaaaaaataatgtctcgtgcttccagcctcaccttgattgtcaccaaagagcagcaggagaaaatacaagccttctgaggaatgccacggttaatgtcagtctgaccatccaagccactacctggcagaaaagagggtgtggagacacggatactgtgtttacattttactattacgggtatctggggtcctaggaatttgtgtgggggaaaaaaagagtaacaaagctataccttaaagacctgattaactgaagagttttctttttttttttttttttgagacggagtcttgctctgtcacccaggctggagtgcagtggcgcgatctcggctcactgcaagctccgcctcccgggttcacgccattctcctgcctc[133 bp omitted]ggcctcccaaagtgctgggattacaggtgtgagccatcacgcccagctgagttttcttttctttttttttttttttttgagacagagtcttgctctgtcccccagggtggaatgcactggggcaatctcagctcactgcaacctctgactcctgggttcaagtgattctcatgcctcagcctcctgagtagctgggattacaggcatggaccatcatgcttggctaatttttgtatttttagtagagatggggttttgccacattggccaggctggtcttgaactctgggagtcaagtgatccacccactt[132 bp omitted]ccgcagccctggaaagattttccgatgatatcatactaatgttccctgctagaaagggagaagagcacttttcagactgaaaaataagcctcaaccataacaagactgtgccatctcttcgaggttgttgctaactggctcaaacccaccctggaacccatggagaaaaaacaatttgaatttaaaaggacttccttagaaaattaatatgtatctaaggaaaaacatccagcatatatctcctgctagacgagacgaggccatgtgtcaaaaaaagaaaatacttatgaagcaaaaacaggcaggcctaccaacgacacaggccctcatccctgtccagtaatcctaccacatttctctggttaacgctgctactaaagttttctcctccaatttccaaatcgctacttctcccaccactgtcacctctgtttaaccttgcccataacttcacagaaaaaactgaagcccagagataattacaagtaactataaaaacagcaattacttttgcaccaacctaataaaacagccttcgcttcccactcccaaacttcgaaatttcatcttcatcctacccaccctctcctgccctcttcctacccaaagacagtccctccgctgtgctttcaatactatcttcctcccttcctctcagaaccttacactgtcactcgctttatctcccttgaatttctaaccagtccccaccacatgactcttcccactgacatttatacagctcaagtctctcccatcttaaaaaaatcttgtcttttttattttatttatttattttgagatggagtttccttctgtagcccaggctggagtgcagtggtgtgatcttggctcactgcaacctccgcctcccaggtcctggttcaagcgattctcctgcctcagcctccctcctagctgggattacaggcacatgccaccatgcccagttaatttttgtatttttagtagagatggggtttcaccatgttggccagactggtcttgaattcctgacctcgttatctgcctgccttggcctcccaaagtgctgggattacaggggtgagccaccaaaaaagtcttttcttgagcccatacttcacttgccaaatcccagtaatcacccaatttctctccctcatcgttagagcccagcatctcgaaaagatttcccatcttctctccttccatttcccttctcccattcgcttcttatcccgtgccagtctggcttcagtgtccactgctccagcaaaaccactctcactatggtcttaccacccgtgccgctaatctgatcaacaattctcagtctgcgtcttgtcccacctcaggaggcacacacggaaataactcctccctcgtccctcaagtagtcttcgcttggcccccccagcccgcaatcccggttatcttcttctttctgttggcctgtctcagtctccttagtcagttcatcttcctctacctgaccattaagtgtggtgtgctttaaaatccagtccgtaaaagggctcattttgatcacctcatcctcagcttcaactgccatctaaacactgaagactcttccccctagtaaaagatgccaggccaggcacggtagcacctgcctgtaatcccaacactttgggaggccaaggtgggaggactgcttgagcccagaagttcgagaccagcctggacaatatagcaagaacccatctgtacaaaaaaaaatgttttaattagcggggggtggtggtacacgcctgtagtcccagctattggtgggtgcggtggggggtactgatgtgagcaccagaggtcaaggctgcagtcagccatgatcacaccactatattctagcccaggtgacaaaatgaaaccatgtcttaaaaaaaaaagaacaaaaaaagggctgggcttggtagctcacacctgtaatcccagcactttggaaggcca[134 bp omitted]gaggcaggaaaatcatttgaacccgggaggtggaggttgcagtgagccgagaccgcgccactgcactccagcctgggccacagagcgagactccacctcaaaaaaaagccaactaaagcctccacccactgaaccatcaaggctacactgagatgcccggccacttccactgatgccggatcagggggatagttactaatggtgcttctactgaatgctcaaggccacagccatggtattttcttcccacacctccaaacctgtcttccagtgttcaggaatccaggagtcaccctggacatgtgttctactcgatgctaatctatcctcagcatctgccactctgacactaaatctgtctcaaacctgtatcgttctcatcagttctactgccacaaccctagtccaagctactatgaatgttctcctagattactttagcagccatctacatagagtttctgcttccaatctgttcctttctaatccattatccacaggcagccagagatatattttctttctttctttcttatttgagatggagtctcgctctgtcacccaggctggagtgcagtggcgcgatctcggctcactgcaacctccatctcccgggttagagcaattctcccacctcagcctcccaagtagctgggattacaggtgcctgccaccatgcctggctaatttttgtatttttagtagaaacagggtttcaccatgttggccaggctggtctcgaactcccgacctcaggtgatccgcccacctcggcctcccaaactgctgggattacaggcgtgagccaccacgcctggcctcagagagatactttcaatcaccaccaccacctcctcatccctgcttaaaaccttccatgagttgccactactccaagaataaaagccaaaacccttagcatggtctataaggccatacacaacttggtccccagtcttcctatctccccagccacatctcatcaattctagccacatgctggaattcttcaaacaggccatgctcctcttctctcatggctttggcacattagaacactttcttaacccaattaacttctattgatcagttcagaaaagctctccctggactgctggccctgatcacaaacacccacaccaccccagctgaagtcagattctcctgttacatgttttccaagaactatagtctttacctccacagcacctacctcagtttatcacttcacattcatttatataattattcaattaaagtatcttcgctgggtgtggtggctcacacctgtaatccgagcactctgggaggccaaggtgggcagatcatgaggtcaggagatcgagatcatcctgactaacatggtgaaaccccatctctacgaaaaatacaaaaaattagccaagtgtggtggcgggagcctgtagtcccagctacttgggaggctgaggcagtcacgccactgcactccagcctaggcaacacagcaagactccatctcaaaaaaaaaaaaaaaaaaaaaaagtatcttcaactagaacaggaatcagtaaatgatggtctatgggtgcctgtttttgcatggcccacaaactaagaatggcttttacattttaaaggattggaaaataaacaatatacaatagaaactatatgtggttcacaaagcataaacatttcctatttgtaaacatttacttcatagaaaaagcgctagactctgagtaccatgaaagcagggtccatgtacatctcactgtctctccagagcttggtacactgcctgctatatgtgctcagaaaatgcttgttaaataactaagtggagatgttatcaaaggatgtaaaagtaggggaaaaaaattaaaacgttaaaagagcaacaaagtatgaaaaacgcacaaccaaccttatactgaacagggaaaagttgaaagcattccccttgagaactggaacaagacaaggatgcccactttcaccacttctattcaacatagtactggaagtcctagccagagcaatcagacaagagaaagaaataaagggcgtctaggccaggcacagtggctcacacctgtagtcttagcacttagggaggccgaggcagtcagatcacctgaggtcaggagtttgagaccagcctggccaacatggcgaaaccctatctctactaaaaatacaaacattagccgggcggggtggcaggcacctgtaatcccggctacctgggaggctgaggcagaagaattgcttgaacccaggaggcggagggtgcagtgagccaagtctgtgccactgcactacagcctgggcaacagaatgagagactccatctaaaagaaaaaaaaaaggaagaaaggaagaaataaaggacatctaaatcggtaaaggggaagtcaaactgtcgttattcaccagtgatatgatcatatacctagaacaccctaaagactcatccagaaagctcctagatccaataaatgaagccggtaaagtttcaggatacaaaatcaatgtatacacatcagcagcactgctaaacaccatcagcaactaagctgagaataaaatcaagaactcaaccacctttacaacagctgcaaaaaataaaataaaatacttaggaatacacctaaccaaggaggtgaaagacctctataaggaaaaactacaaaacactgctgaaagaaatcacagacgacacaaacaaatggaaacacatccatgttcatggataggtacaatcaatattgtgaaaatggccatactgccaaaagcaatctacaaattcaatgcaattcccaccaaaataccaccatcattcttcacagaactcgaaaaaacaatccaaaaatttatatggaaccaaaaaagatcccataaagccaaagcaaggctaagcaaaaagaacaaatctgggcgcatcacattacctgacttcaaaatatactacaaggctacagttaccaaaacagcatgatactgatataaaaataggcacatagaccaatggaacagaagggagaacccagatataaagccaaatacttacacccaactgatcttcaacaaagcaaacaaaaacaagtggggaaaggacacccttttcaacaaatggttctgggataattggcaagccacatgtagaagaatgaaactggatcactctcaccttacacaaaaatcagctcaagatggatcaaggacttaaatctaagacctgaaaccataacaattctagaagataacatcagaaaaacccttctagacattggcttaggcaaagagttcatgaccaagaatccaaaagcaacaaaaacaaagataaatagatgggacttaactaaaaagcctctgcacagcaaaacaaataatcagtaaacaacccacaaagcgggagaaaatcttcacaaactatgcatctgacaaagaactaacatccagaatttacaaagaattcaaacaaatcagccagaaaaaaacaaataatcacatcaaaaagtgagctaaggacatgaacaggcaattctcaaaagaagatatacaaatggccaacaaacatgaaacatcactaccatttgatccagcaatcccactactggacatctaccagaggaaaagaagccattatatgagaaagacccttgcgcacaatattttatagcagcacaattcacaattgcaaaaatgtggaaccagcctaaatacccatcaaccagcaagtggataaagaaaatgtggtgtgggccaggagtggcggctcatgcctgtaatcccagcactttgggaggccaaggcaggtggatcacgaggtcaggagtttgagaccagcctagccaacatggtgaaaccccatctctactaaaatgtaaaaaattagctaggaatggtggcgcacgcttgtaatcccagctactcaggaggctgag[133 bp omitted]gtgtatatataccatggaatactactcagccataaaaaggaacaaaataatggcattcgcagcaacctggatggcgttggtgaccattaatctaagtgaagtaactcaagaatgaaaaaccaaacatcgtatgttctcacttacaactgggagttaagctatgaggacgcaaaggcataaaaatgatataatgaactctgaggactcgggcggaaatgtgggagatgggtgagggataaaaaactacatattgagtacaacgtacactgctcgggtgatgggtgcaccaacatctcagaaattaccactaaagaaattatccatgtaaccaaacaccacctgttccccaaaactactgaaataaaaatatatatataggctgggcacagtgcctcacacctgtaatcccagcactttgggaggctgaggcaggcggatcacttgaagtcaggcatttgagaccagcctggccaacatgttaaaacctcgtctctactaaaaatacaaaaattagccaggcgtggtggcagaggcctgtaatcccagctactcaggaggctgaggcaggagaatcattcgaacccaagaggcagaggatgcagtgagccaagatcatgccactgccctccagcctgagtgacaaagtgagactccatctcaaaaaaaaagtttctatttgaagcttatcctctctgctatcagggaattgtttccaattattctgtccccagaactacatgtccaagttgaaaagaacatgccacatccaagatggggaataagatgggggaggaggaggaagtagggcagcagctgaaacctcacctgtaacacctgctgaatgctccgaagccaagacacacagtgctgctggaatagctctgtggggctctcccctaccagcagggacagcagacacaggccctcaaaccttcaaagaaagaagagagtcatgttaagtgggcggaggctagacttcagagaaagtgactgctcttttattctcactaggctacagcaagacttcatccccagatccactgtggtttccaactcctgaaatacttggaatgaggtggaagaagcaaagaaagaagggagcagaggtaatcccagggtggaataggacatctgggagctggaaaaggtagggttcaaatcaagtgagctcacaaaaggaatgtaactctccacactcttgggaatagagagaggtcttgaatcctggggacggtgacaatgaaagcaaagatgtacatatgcccacttcctaagggaacacgcccctggagaaaaaaaagggccaaagacttaccgagttttgatggaactgagacgtgcattactgagactcaccaatgccccaagagctgaaaggttctggaggaaagaaaacagggaagcgagtcacaaacgggatgttaaaaatgcagaagattcttcaagcccttctctgtcccagcacctatgaagcctttctgaagtcacatctcctctgaggccaaaaggccatcccactagaagccttgagcttttccccttttttcctgtgggaaaggctgtttctcggcctttcctcaagttatattttgcctgatccttccctccatgccccacccaagtagtgccaaacacaggacagcccaactaatcccactaccagacttcaaagatgggtctgcttcacctctatatgtctgggcagcacctaataggagacatccataaatgcttgctgaatggacactgaactcatccattatccttccttcaccctcaaacaaatcctcctccccctattcctggcttccttacagctgtaaaaatgccaacacagaccgagtcaacaagaatcctccttccagttctccccttctctcacattctggaagcccacgaaagatgtttcctcatcagccccccaggtaacctctccatgccccaaatggccagcctcctctcacggcacccgcgtctccctaacggcgtgcatcgttccttcttccaacacatacactatgcatgaggttacgtgaaggaatacagagctgaataaaattaataaggtctctcccttttgtgga[221 bp omitted]gaggcaggagaatggcgtgaacccaggag[133 bp omitted]aggtacttattttctagttaagaggagacagaaaataaacaactgacaaagtaaatacatagtatatcagagggtgctaagaactccaaggaaaaataaagcagagtaaggaaggaaaggagtgcccagagtaggcaaaggggacaggattttatttaggagagtagatacaaaaagcatctccaaaaaggccatttaggccgggcgtggtagctcacgcctgtaatcccagcactttgggatgccgaggcaggtgggtcacctgaggtcaggagttcgagaccagcctggccaacatggtgaaaccccgtctctactaaaaatagaaaaattagctagttatggtgacacgcgcctgtcatcccagctactcgggaggctgaggcaggagactcgcttgaacccaggaggcagaggttgcagtgagctgagatcacaccattgcactccagcctgggcaacaagagcaaaactccatctcaaaaaaagaaaaagccatttagcagagacctaaaggaaagtgagaacaagatgtattgatactctcaaatatttaccacaaatataaaatggcgcagccactctggaaagcaatctggcagttcctcaaaaagttatacatagagtgaacacatgacccagccattccaccctacgtatatacccaagagaaatgaaaacctacatcctcacaacaacttgtacatggacgttcacagcagcatcattcataataaccaaaatgggaaaacaacccaaacgtccacccactggtgaacagatcaaatatagtgcagcagcgcccccttatctgcagggggtgcttccaaaaccccaggcaggtgcctgaaacctcagaaacttcggatactaccaaaccctacataaactgtttttttcctatacatacaagcctatgaaagattttatcagttaggcacagtaagagattaacaaccactaataatacagtacagcaactataataatatgccagcatctctactcttacgctttgggccattatgaagtaaaataaaggtgacttgaacacgagcactgcaataccgccacagtggatctgatcaccgagatggttacaagatgaccctcaggcagggagcatgtgcaacatggatacactggacaaaaggatgattcatgtccgattcacgtcccaggtaggatgaagcagaactcctcgagagtccatcacgctgctcagaatggcacgtaatttaaaacttatgaattacttatttctggaattttccacctaatattttcagaccacggttgaccacaggtaagtaaaaccatggaaagggaaagcacagataagaggggactattgcataaaaggccataaataggaatgaagttttagccgggcacaatggcacccgcctgtagtcccagctacttgggaggctgaggcataagaatcacttgactaatcctgagagtttgaatccagcctaggcaacacaagacccaacacagcaaaacagaaaagagtaataaagtcttgacacatggatgaaccttgaaaactgactgctaagtgaaagaagccaaacccaaaggctacatattatacaattcatttctatcaaatggccagaataggcaaatctctaaagaaaaaaagtagattactgtttgcctaaagctggaggcagccagggagggcttggtgggcaatgggaatgactgtaagtgggtacagaatttctttatggagtgatgaaaatgttccaaaactgagcacagcaatgaccgcacaactctgcaaatatactaaatccacggaattgtatactctaagtgagtgaactgtggccgggcgcagtggctcatgcctataatcccagtactttgggaggccaaggtgggcagaccacctgaggtcaggggtttgagaccagcctggccaacatggtgaaacgccatctctaccaaaaatacaaaaaaaaaaaaatcagccaggcgtggtggcaggcgcctgtaatcccagctactccaaaggctgaggcaggagaaccgcttgagaacgggaggcggaggtcgcaatgagccaagatcgtgacactgcactccagcctgggtgacagaatgagactccacctcaaaaaaaataaaataaaataaaaataaaatgggccgggcgcggtggcttacgcctgtaatgccagcactttggggggccgaggcaggtggatcatgaggtcaggagttcaagaccagcctggccaacatggtgaaaccccggctctactaaaaatacaaaaattagccaggcgtggtggtgggcgcctgtaatcccagctactcgggaggctaaggaaggagaatcgcttgaacctgagagaatcgcttgaacccgggagaatcgcttgaacccgggagaatcgcttgaacccaggatgcagaaattgcagtttgccaagattgcaccactgtactccagcctgggtgacaatgtgagactccatttcgaaaaaaataaaaggccaggcaccgtggctcatgcctgtaattccagcactttgggcagccgaagcgggtggatcacgaggtcaggagtttgagaccagcctggccaacatgatgaaaacccgtctctactgaaaaatacaaaaattagccggacatggtggcgggcgcccgtaatcccaactactagggaggctgaggcaggagaatcgcttgaacccgggaggcagaggtcgcagtgagccgagatcacgccactgcactccagcctcggcaacagagtgagactccgtctggaaaaaataaataaataaaatggctaaattgtatggtttgtgaattatttctcaataaagctgttttggccaggcacggtggcctataatcccaaaattctgggaaaccaaggcaggcgaatcacttgaggccaggagttccataccagcctgggcaacacagagagacaccatctctacaaaaatttttaaaaattagccaggtgcaatggcatgcacctgcagtcccagctactcgggaggctgaggcagaaggatcgcttgaatccaggcgttcaaggctgcagtgagctatgaacacactactatactccagcctgggcaaaagagtgagaccctctctcttaaaaaaaaaaaaaaaaaaaaaaaaaatctggcagggggcagtgattcacgcctgtaatcccagcacttggggaggccaaggtgggcagatcatttgaggttaggagtttgagaacagccttgccaacgtggcgaaactaaacatctaaaaatctactaaaaatacaaaaattagccagacgtggtggtgtggtttcaccatattggtcaggctggtctccaactcctgacctcaggtgatccgcccaccttggcctccgaaagtgctgggattacaggagtgaaccaccatgaacccccgcagtaaagctgtttttataaaaaggcatactgataaccataaaaaaaagagtgttccaggaaaagaaaaaaaaaaaaaacaggctgggcaaggggctcatgactgtaatcccaacactgggaggccaaggcaggaggatggcttgagcccaggaggtcaagatcagcctgtgcaaccgagggagacccccattctccacaaagaatttttaaaaattagccgaacatggtggagggcacctgtggtcacagctacttgggaggctaaggtgggagggctgcttgaccccgggaggtcaagactgcagtgagccatgatcgccaccactacactccagcctgaacagcaaagcaacatcctgtctcaaaaaagaaaaataaaaagagcgaagactatgagatgagagcatacttcgttatttccaaagaacaacaaggagacaaattgttgatggagaaaagtgagcaaggtggagaggagtaaccaatgatgaaggttaagggagtgggaccagactgtgcagagacatataggtgattaccgactttcaccctgagtaagataaaagccacgagggggagagagaaattgcgcacaggagtgacaatatctgacttctggtttgctttttgttttgctttgtttttaatcaacagcatttgtgttgtcttgttgagaaggcagaagcaaacagatgaggtagaaggttactgtaatattccagacaaatgatgatgcagcttgaagaatgtggtaactgtggcgatacaaagcagtcaaaatcaggaagtactgtgaaggtagagccaacgggatgtgccgtcaaactggatatgggtggaaaataaaaagaagggtccaagataatgccaaggttttttgctgaacaactagaaagatgaagctgccattcaccgagaagggaactaatgcaggaggagcaggttttggggtgacaatagggagctcagtttcagatctgttcaatctgtgatgtgtatttaacatgaaaacggagatgccaaataggcaccggctagacaagtgtgaagagaacttctggctggagatgtaaactcaagaggtgtgggccttgagactggatcagttcaccaagggaataagagtaaagagaagagaaacagtgcaaggcctgggttgtaggcactcaaaccttcagaggtcacagaggtgaggagggatcagtctttactggaaaggagtaaccagtgtgataacaggagaatcgagaggagaggagaggggctgggagggtgactaacgcctataatcccagtactttaggaggctaaagtgggaagactgcttgagctcaagagttcaagaccagcctcagcaacatagcgagaccttgtttctactaaaaatcaaacagattagctgggtgtgggggcacacacctgtggtcccagctacccagaaggctgagcagggcggactgcctcagcctggaagatcaaggatgcagtaagctatgatcgcgccactgcactccagcctgggcaacacagcgagaccctgtctcaatgaaacaaacaaacaaaaacaaaaagacaggggagagatatcccagaagtcaagtgaagacagttttttaaataggaaagtataattaactgtatcaaatggtagcgataagtcaaatatgatgacccaaattgacctttgaacttaatgtcttgatggacaccagtgatcttcaagagttaccatttcacccagcaaagggttgtttcggcagcatttaggctaaaagcctgaatgtaatgagttcaacggaacaaccatcatagtaataattcattcagggaagaacctttaatagatgttaaaatgagtgggtgaaaggttgacaagacctaagacattcacattatctccccccaagacacttaactacaaatggaaaaaaaaaaaatcatacctttataacagtgaagaaatctggcagagacctgcttaacctagaatacgtgctcctgatgtgatgcaccaagaatgacacatcatttctgcaaggttttttttttttttttttgtagagatagggtcttgccatgttgcccaagctagtcttgaactcctgcactcagtgatcctcccacttcggcctcccactaagcctctgaatctcatgctgggataacaggcatgagccactgcacctggacgacttctgcagtattcttgctgaaaacgcacaaatctccagtttaatttgtctgctgtttcctcatgattagatcctaacctgaggggcatcctacgaaataactattctgtactctttaaaaatatcaagatcataagacaaaggctgaagaactatttcagattaaagaatactaaagagacattataactaaaagcaagctgggcgcggtggctcacgccagcacttcgggaggacaacgcgggtggatgatctgaggtcaggagttcgagaccagcctggccaacatggcgaaaccccatcgctactaaaaaaaaaaaaagaaaaaaaattagccaggcatggtagcaggcgcttgtaatcccagctacttgggaggctgaggcaggagaatcgcttaaacccagggggcggaggttccagtgagccaagatcatgccacggcactccagcctaggcaacagactgagattgtctcaaaaaaaaaaaaacaaggcaaaacaaacaacaacaaaaaaaacaactaaatgcaacatgtgatcctgcattaaatcctggactagaaatgttgttgttgttgttgttgttataatggatgcctttaggagaactgatggcaaaacttaaaaaagatctgtaggttaaataatttattgtaccaatattaattctctgatcatgatgatagagtatgattatgtaagagaatgtccttgtttttaaggaaatacacactaaaatatgtcaaagtaaaaggacatatctgcaacttactcctaaatggacccagaaaaaatatctgaaagaattcctgtatcctcttcacccagaattctccagttttcaaatgtgcatttatgttattctcagaatgatagtttaggagatctgtcattatcagaataacataaatatgcatttaaaaactgaagaatccagccaggtgcggtggctcaggcctgtaatcccagcacttcgagtgccgaggcgggcggatcacgaggtcaggagattgagaccgtcctggctaacacggtgaaaccccgtctccactaaaaatacaaaaaaatagccgggcatggtg[133 bp omitted]caaaaagaaaaaaaaaatggagaatctaggagaagggtatatattgaaattctttcaaatattgttccaacttttctgtaaattttcagttatttcaaagtaacgctaaaagaagaagaaggagagacaaaaagtacagataacactttcaaggagtttttgccataaaaggaagtacacaaatggcaaatgaggcagtagctagagggtgatttgtttgttttttgagacaaagtctccctctgttgcccaggccagagttcgcaggcgcaatctcggctcactgcaatgtctgcctcccaggctcaagcaattctcctgcctcagtctcctgattagctgggattacaggcatgcgtcaccacgcccagctaatttttgcatttttagtaaagatgaggtttcgccatgttggtcaggctggtctcgaactcctggcatcaaatgatctacccatctcagcctccca[133 bp omitted]caacctctgccccgagttcaagcgattctcctgcctcagcctcctgaatggctgggattacaggattacagatgcctgccactgcgcctggctaatttttgtatttttaatacagacggggtcacc[136 bp omitted]tccaacaaaaagagaggccaggtgcagtggctcatccctgtaatcccaacattttgggaggctgaggcaggaagatttttttatttaagtaggagtacactctaaaatacgacaaaaagtggccggatgtggtggctcatgcctgtattctcagcactttgggaggtcgagtggggaggataacttgaggtcagaagttcgagaccagcctgaccaacatggtgaaactccgtctctactaaaaatacaaaattagctgggtatggtggcaggtgcctgtaatcccagctactcaggaggctgaggcctacgtagaagacagaacaagacactgtttttgtccttcaaaagaatatacaggataaatgacatttgggatttgctttaaaatggtccaccaagctgagcacggtggttcacctctgtaatcccaggattttggggggccaaggcgggagtatcacttgagttcaggagttcaagaccagcctggacaacatataaagcccccatgtctacaaaaaaaatttttaaattagccaggggtggtggcacacctgtagtcccagctactcgggaggctgaggtggaaggattacttgaacctgggaggttgaggccaaggccgcagtgagccataatctggccactgcactccagcctgagttagagtaaggccctatctcaaaaaaaaaaaaaagaaaagaaaagaaaagaaaaagagaaagaaagaaaaagcaaagttccactaaaaaaaaaaaaaaaaaaaaaaagccaagctatgggaggaatgaaataacattggcaaacgttcactgttaaatttgagtgatgggggcagcatagggtggggtggggaaaatactatttatgtctgaaattttatataagttttattaattacatacaagaacaaatcaaagacttgctgaatgtaggggagagaggttataagtatatgtgaaataaataaacagacagtaggataaagagcagtcaatcataggtggccaagaaatatatcccaaaggcagtgacaaataagcaaagaattgagaagactgggaaggaggatgagagttgggggggtgggggcactgcacagggagggattccaagagaagagtaagtacaaagcctctgaggaaagaacacccagaggctgaaggatttttaaaagctgcaaacaggatcagaattttactttagaaagctcactccagctactgtgtggggaacggattacagagggcaagactgaaggtaaggagacccgttagaagattgttgctataatatactccaagctagatatggagcactgtgctaggatcattccattttggaactactgagcttgcagtacctgcggaaaagccatgttggtaggtggatgatcaaacagtggatcccccttgctcgcaagctccaggtctattgctgactttcatttctcatcttaactagactagaaattctctgagggaaaggaccatgtcttatttatctacctagagacgaggaacagtacgtaaaacataacagatactcaataaatgtttgttgaatgaaacctttggggaaggaaaggaaatcctccacataatcccaattcaaaggacacaagtagaaaaaaaattcaaggcaggatgtatctaaacaagtagcacaggaaatattaaagggcggccctagtttcccacatcactcttagcttctttactcaaaattctactagacttcagacatgtaagaaaaataagcaagacgttaagttcatgtagttgactttgagggaggagaggaagtcctgaaagagatgatgaaagaaatcacacatttataggcgggataggtaatatttcacaaatacttataaaaaaaatttctggggggcaaggcatggtggcccgtgcctgtaattccagcactttgggaagccaaggcaagtgaatcgcctgaactcgggactttgagaccagcctgggcaacatggcaaaaccccgtctctaccaaaaatacaaaaattagccgggcatggtggcgcatgcctgtggtcccagctactctggaggctgaggtgggaggatcccttgaggctgggaaatggaggttgcagtgagccaagatcatgccactgcactccaacctgggtgacagagtaagaccttgtctcaaaaataataataattctgggactattgtgagataaagaaaacagaaaaaccccactgtaatataactgactgatgaaaaccacataaattagaagaggggaatttagagacaagagaaaatacataatcagctccagcctctgatattgggctgagatagcagagatatagttttgtcaccctcaattatgcagagtaatgttaaagacaaacagatagggttatctgtgataaatctggggctaaggttattgacccacccagcaaattgtgacaaccatcttcctggaaggtagcatagagctaggaaggtcccaggaatgaagggtggacacagaagatctcgtgtttatgggtcttgaaggatgggtagaatttgggggaggtttagtgggagagaagggaagataggagattgttataaggagcagctattatgggctagaaatatgccttcttagaatcagtgccttcacccggacaagatggtgggggttcaagctagaatgggagcaatgagaaagatggaaaagagtggacagatctgaaaactactcaaaggataaaatcaacaggacttgacagattgcttatggaggtgtatgaagaagagtttagaattacttgagtgtctagcttgcagaactgaatggttatcagattccattcttatagaagtccaaaggctcctaacccggcctaaaacgctctgcatgacccgaccactgcctacccatctcaccagtctcatctgtacccactctcttcccctccacatctgagccccaggaacgatgcccttctttccagttccttcctaccacagggtcttcccacatgagctctcctctgactgaacagcccctcccatattttttccctacccaacccctattcatccttagggtctcagcttaaacgccggtttctttggaaaaatctctgccagtcttcagataaggttagagacccctgatattcaattctcatcttgtttcgcagcattttgtgtatcgccaccacgtctgtaaccggagcgcctagtacagtatctgaccctcaataagagctcggtaaatgtttattgttgaatgcgtcattcagtcagtcgaaacaatccccgaaacagatattgccagaggaaaaagagacttttagattatacaactagtgagtgaccgggcctggaacctaatcgattcctgtgtgccgaccaatagcctaacaacagaaaaataaggcccatttttcccctggagaaactcatggccgataaaggagaaatacgtgcatcccgtccggactgatacctggatcccctttctgcccgcagctctccttccttcaacctccctatcgcacttgcactgcaccgtaatcccggcgcacaggtgccgcgccatcctccccacagggccgcgggcacgcgggccacggactcacctgggccccgcccaccgacccatgcagccgcaataggcacatgagcccgggcaaatgtggggccgagcggtttgggggatgcaccggagcaacggcagaccccgttcgaggttgcagcaaaccagaaacactctccagcagcagcaggcggagccgcgggcccgagctcactgccgagagacccccggtcccgccaggaaccccagccgcggagcccgcagagggcccactcagaacggctgccgccatcttcccccgggttccagtggtggcgtggcgcgatgacgcaaacacaccgcgacggccgcctactggggagggggcgtggggagggggctgcggtcttgcgcactgagtgaaggcaggctggactcgcgggctcaagctgggaaggagcatgcgcggagagagcagcctgggcgccgaggcagcggggtgctcggttcccggagtgatggcggatgaggctgcctgtgagcgtgtccgaggcggtcctgtgatgttaaaggtacacgtggtccggacaaaaggcgccaaagtcggaacgatttccatttagcggacggagtcttgggacatcttcgctgtaggaatcaataactctcattttttttttttgagacggagtctcgctctgtggcccaggctggagtgcagtggcgcgatctcggctcaccgcaacctccaccttccaggttcaagcgatttccctgcctcagcctcccgagtagatgggattacagtcgcgcgccaccacgcccggctaattttttttgtatttttgtagagatggggtttcaccatgttggccaggatggtcttgaactcctgacctcaggtgttccgcccgccttggcctcccaaagtgctgagattacaggcatgagccaccgcaccctgcctaggaatcagtaacgtgtgtgtgtgtgtacgcgcgccaaagatttatttcttcatttcttgcatttcaagtactcttcgatgtcatccttggcctgagactccttgccatagtccttaactactacacaactgcaaccaaccactttacggggtttcccctctctgtcgatttttacagagccctacccattctcctagtttcttgttgtcatcaaccttaattaggttgatttggtgttcagcacaaaggcctccaccaacttgacatacatagtaggctcatcatagttggatgcaagcacacaaagatgggcttggcgtttgtctaaggctttggcagcttcgcgaattccacgtgctaggtcatggtggatgagagcggtcttcagcacctcttgtgaagcagtattaacatccattacccctccagcagcaatgccttcctcggccgtggcggtgggttacaagtgaagctgaatcttgaaggtacccaagcctccgcctccgcgcaactcggcagcggcagggaaagagaaggaatcaataactctctaggtaacttgaaatcacagacatttttaactacatttgcaacttcagaaatgatacaagacgtgcgccttgcaaaagccaattcaaacagtacagaaaggcataaagtaaaaagaaaaactgctcctcccccgcaaagccctgccccagtagcgtgtatactttcctaatattagtctatgcacaagcacataaatgaatattttacaagattggggtctgcgtgtggcttgttttcactcatggccttctttatgctgttttttaaactgtggtatgaatgaaatgggtgcaccatgatttaataattctattgctgaattaatgcttaaaggctgctccagctttttgctaatgcaaactgtagtgaacacgctaatacctctatgtttatgtttgtgtacttttgtgattgttagattcaaatccaagagtcatcatttttctttttttgaggagtctctctgtcgcccaggctagagtgcaatggcacgatctcggctcactgcaacctccgcctcccaagttcaagtgattctcctacctcagcctcccaagtagctggaagtacaggcacccaccaccatgcccagctaatttttgtatttttagtagagacggggcttcaccatgttggccaggctggtctcaaactcctgacctcaagtgatctgccggcctcagcctcccaaagtcctgggattacaggtgtgagccaccccacctggcccgtttttcctcttattgcctcctatccaatccttcaagtcctggcattcaaggcctccaaaatacattaacccaatagcgttaatttttctccatctccactgccgctccggtccaaattaccattcactctcacctagtctattacaaagccttcgttgctctctgcttccctcttagcaccctgtagtcccttcacacagcaaccaaagtggtcttttcaaatgtaaacaagttgttgtcactcctagcttcaacccctctgtggcttccaaatgtgatgagaatgaaatcccatctcgtcactgaggcctaaaagaatccacccaatctgactcatacccacctccctgacctcaacacataccacaagtacccttttccttctctcttcctattcttgagccacgctagccttctattttccagcaaagcccattctcacatccgaacctttgcacatgttgctgattatgctggagaaactgtcctttgattctatgtaactaacgccattttgccatcctgagacgacttctttttcggtagctcccactccaacccccatcagcctccatcacatttgcctgtttataattcatgtcattaccagaaatttgctttcttattaactatctcttgtctaaaatacaaactccatgaaagggctcctgtctcctacactatgctattcctatcacctagaacagtgcctggtacataaaaggtgctgaaaaaatatttccccaggctggagtgcagtggcatgatcacagctcactgcagccttgacctcccagctcaaacgatcctcccacctcagcctccctagtacatgagactctaggcactagccactatatttggctcatttttcgtttttcggaggttttttgttttcttttttcctcgagatggagtttcgcactgtcacccaggctggagtgcagtggcgcgatcttggctcactgcaagctctgcctcccaggttcaggccattctcctgcctcagcctcccaagtagctgggactacaggcgcctgccaccatgccggctaattttttgtacttttttgtggagacagggtttcacca[137 bp omitted]ctggagtataacggcacgatctcagctcactgcaacctccgtctcccaggttcaagtgattcttctggctcagcctcacgagtagctgggattataggctaaatttcacgatgttagccagactggtctcgaactcctgacctcaggtgatccacccccctcggcctcccaaagtactgggattacaggcgtgagccactgcacccaaccccctctgctttaaaaaccagtactggttccacatgtccttctgtggggccctccatctcactccatctgctatacaaaatcctccacagcctgttccagacttccccaccaacactacgcaacaggacgtgccttgtctctctctttgaaatgccctttctcaacttctgcccagccaggcgcggtggctcacacctgcaattccagcactttgggaggctgaggcaggtggaacacaaggtcaggcgttcgagaccagcttggccaacatggtgaaaccccgtctctattaaaaatacaaaaagtagccaggcattgcaggtgtctgtaataccagatactcacgaggctgaggcacagaattgcttgaacccaagaggcaggggttttgttgagccgagatcccaccactgcactccagtcagggtgacagagtgagactccatctcctaaaaaagaaaaaaaaaaagaggctgggcgcagtggctcacatctataattccagcactttggaaggcgcaagcaggcggatcatttgaggtcaggagttcaagagcaacccggccaacatattgaaaccccatctctactaaaatatatatatataaactagcgaggcgtggtagtggacacctgtaatcccagctacccgggagactgaggcagaacagctggaacccaggagatggaagttgcagtgagccgacacaacaccagtgtccagaatttgtagggggtctcactgactttaagaatgaagccatggaccctcacagcaagtgttacagttcttaaaggcagcatatccggagtttgttccttctgacgttcggatgtgttcagagtttcttccttctggtgggttcgtggtctcgctagctcaagagtgaagctgcaggcctttgcggtgttaccccccttaaggccgtgtctccgaagttattcattcttcttagtgggttcgtggtttcactggcttcaggagtgaacctgcagaccttcccagcgagtactacagctcataaaggcagtgtagacccaaaaaaggagcagcagcaagatttaaccgcaaaaaacaaaagaacaaaaggtctacctaacagaagagtaccccagtgcattgcaattgccggttcaggcagcctgcttttattctctaatcggccccacccacatcctgctgattggttcattttacagagagccgattggtccattttacagagagctgattggtctgttttggcagggtgctgattggtgcatttacaatccgtgagctagacacaaaagttctccacgtccccactagattagctagatacagagtgtagacacaaaggttctccaagtccccaccagagtagctagatacagagtgtggattggtgcattcacaaaccctgagctagacacagggtgctgattggtgtgtttacaaaccttgagctagatacagagtgccgattggtgtatttacaatcccttagctagacataaaggttctccaagtccccaccagactcaggagcccatttggcttcacccagtggatcccgcttgggggccgcaggtggagctgcctgccagtccgcatgtgcttgcactcctcagcccttgggtggtcgatgggactgggtgccttggagcagggggcggtgctcgtcggagaggctcgggccgcacaggagcccacggagggggaggggaggctcaggcatggcgggctgcaggtcccgagccctgccccgagggaaggcagctaaggcccagcgaaaaattgagcacagcagctgctggcccaggtgctaagcccctcactgcccggggctggccggccactccgagtgcggagccgccgagcccacgcccacccggaactcgcgctggcccgcaagcaccgcgcgcagcccgggttcccgcccgcgcctctccctccacacctccccgcaagctgagggaaccggctccggccttggacagcccagaaaggaactcccacagtgcagtggcgggctgaagggctcctcaagcgcggccagagtgggttccaaggccgaggaggcgccgagagtgagtgagagctgccagcacgctgtcacctctcaccactgcactccagcctcggcgacagagtgagactctgtctcaaaaaaaaaaaaaaaaacaagaaaaagaaaaaaaacttctgcgcatccttcagaaagactgtcctcatctgttccccgctctggacagcctgcactccctccacccccgcccgggccaattgctgttagcggctgtgtcttctgactcagacctctgtaatagcattcctgggtaatacctgtgtatgtgtctcctcaactattctaggaaggcaggggccatggtaattcgtatgtgtccccatcgattggcatagtgaatagcataacataggcacggatggatgggtccatagatggaccgatggatgggagcgggtgagtgagtggatgttagctgggatgggtgggtgaaggagatggatagtcagagacattggaaaagggaaccctgcgaagatcaaatgcaaacaccaggaggagctgacacgctgcagtgaagaagcgggagggctggccacagaaggcggcacgctccgagtggagcaggtgagcggcgcgcactgaagcaagcatcacgcaattgaaccgctcacccacgtgttcccccccaccatcctccttcccagacggcgcttcagctcattccaccgcccccagcagcccggtcgcccccaccgccactgagaaagcaaacaaaggggaggagacccctgcaggttctggatgccgaaggccaatcgaaagacttagatcccctggaaggcgggcgccttggtttaggggggtccaatcggtttcaaggggttgcagcggggcggggagatgggcgggaggagtgggagctggccccgcgcgcgggggagggctaccaggctgggaaggagcgcgaagggctgggggcggagccaatggccccgcgtgtctgctaggagagggcgggcagcgccgcggcgcgcgcgatccggctgacgcatctggccccggttccccaagaccagagcggggccgggagggagggggaagaggcgagagcgcggagggcgcgcgtgcgcattggcgcggggaggagcagggatcttggcagcgggcgaggaggctgcgagcgagccgcgaaccgagcgggcggcgggcgcgcgcaccatgggggagaaacccgggaccaggtaagggaggtggggccacgcggcggggcatgggcggcggctcggggcgggggctgggacggtcccagacgagggcgcagcggagaggatctgggggccggacgcctgggtccctagggacagccatccggggccgcacgcgcaggtcctcgaggataatgagggtgggggggaaatgcccgggcccctgcagaaagcgaggcctgagggggatcagaaaaaccggtgtcggggttctcgcagggatgtggggccagactactgggctctcccgtgcaggctgcgatgcagggatggaggaaggaggagcaggtggctggccccgaggggtcgtgtacggggaggctggatgccgggacgggggggatccactccagactcgcgccaagccaatggaaagcctcctatccaatatcccccaggtagtcgcgctgcccacacctgtcccgagggccgggtggctcctcacccaaacttctaccttcccttgggttgccaggagcaacagcttcatcttgggggagccgagtgcgtggcgaccctccctgaaactagatcgtatccctctctctgggggtgggggaggcagtattcaccctgggcgcgcgtccactccccggatgttttctgtgcaatcgaggctctttccttccactgataccccgagttctcttttttggtctctagcaaaatccacttcctgttgtgactcaacacccccaaggggcaaggggtggatgcctgagtcgcaggggagcgggagcaaaagacgaaaaggttggggctgtaggcctcaactcagagggtatcaggaatagggaattggtcctgagctctggcttgctctgcaaaacatcatatcaaccccacttccaacctatagagtatgagaacccgggtttctgagcatcaagtagacgagcatcagaaagagatcatcagagagatgatccgtctcctggatcagggtttaaacatcccagagaaaggggaagttgctgacttgtgggaggcccctgatttccgtcatgtggttcagggagtgggacggatggaccaaaggagactgctaacttggcacaatttccctcacccccatgaaattctgggccacaggaaatggagcgaatagcaggaagtgtgaaaggacatctgcttcagctacccctgctcccactgggcacctccctggtcatccccacactctgcctccttggccagcctagtatatgcacgctgctcctccccagcctggcaggaggtggctgggttaggatccaaagggcaagtgccttgcagctgctccagggcaattgccccagaaccacactccagttggcccactgattgtggctgtcacagccctgtgccagggctcctaatgggaggacaccctgggacaaagaggaaaaccagaagcaaaggggagggagagcctggatgatgccacggcactcagctcccaagttgggatgaaagatagggtgtttattctagcggctaccatatcgatgtgtattctcttttattggttaggaatacctggggccctccataccctttgccttacaacctttggacagcttggctttctgggaagaaggggcaagtgaagttgtagcagaaactgggcctatggtagaaaccatgtagggccaaaggccagggtcattgctctcctatatgctccagctgtcagagctggagaccagatggaaagatggttaggtcttacccagacactgtggtaacctgcccattggggtcctctgggaatggggtggtagacttggaagagggatgggctagttggcaggatttcacgtttctgctatctatctgaggatcctttccagggatcactgctgaggcagagtggattggaaggagtaaggtggtgcttcaaagaacaggcccacaattggccagatcactggggttgccaaacacttccttaccctcccagcaatgggtggagtccaggcttaaattgtttcagcaactggaaagcaaataaccttcaattcaacaaactatttatgccaactgcagagacagatagtgtaatattgatcgagaggatggactcggagccagactgccttggtttctattaattcccaccatttactccctctgtgaccttgaaacacttgacctctctctgcctcagtttcctcacctgtaaaacagagatattaggagctccatcactgggtggttttatttaatttaattaatttatttatttatttattttttgagacaaagtcttgctctgtcacccag[138 bp omitted]catggggaaacctcgtctctactaaaaaaatacaaaatacaggccagacacagtgactcaagcctgtaatcccagccttctgggaggctgaggcgggcggatcactagaggtcaggagtttgagatcagcctggccaac[137 bp omitted]cagtgaaaccccatctctactaaaaataccaaaattcgccgggcgtggtggtgggtgcctgtagtcccagctactcgggaggctgaggcaggagaatggcgtgaacccgggaggcagaggtcgcagtgagccgagatcgcaccactgcactccagcctgggcgacagagtgagactccgtttcaaaaaaaaaattagccaggcatgatggcaggcacctctaatcccagctactcaggaagctgaggcatgagaatcgcttgaacccaggaggtggaggttgcagtgagctgacagcgtgccactctactccagccttggtgatagagtgagactccatctccaaaaaaaaaaaaaaaatacaaaacatagccgggcatggtggctcactcctgtaatcccagctactcaggaggctgaagcaggagaatcacttaaacctgggaggcggaggttgcagtgagctgagatcgcaccactgcactccagcctgggcaacagagtgagactctgtctcaaaaaacagagtattacaagagatgacacatttgaaacacttggaacagtgctgggcatggagtagtcactctgaaatgttagcagcattaccatcttcatgatatggctggcattgtgctggagatgcctaaattaataaggcctctgaggctcacagtctgaggagggagggagctaactatccttgtgtgctaccacaccacaagtaaaacataaacaaggtgtgacaggaacccaaaacaaggagcgaccagggtctgggctgggtcagcttcctaaaggctgggccttaaaagacaaataggcttttaagctcttgaggtcggagttggggacagttggaggtgagtagagtcgaacttgggtagggcctgtggtagaaactatctgagggccaaaggccagggtcattgctctcctatatgctccagctgtcagagctgtagaccagatggaaagatggttaggtcttatccagacactgtggctacctgcccattcgggtcctctgggaagagcctgggtggttcctagggcaaccagtggccattactggggagggaaggggacgaatgagggtggacaagacaaggggcatttccccttgccaccacgttagaaataggaaggaccttccgggaagaagggttccccttgccaccacgttagaaataggaaggaccttccgggaagaagggttccccttgccaccacgttagaaataggaaggaccttccgggaagaagggttccccttgccaccacgttagaaataggaaggaccttccgggaagaagggttccccttgccaccacgttagaaataggaaggaccttccgggaagaagggttccccttgccaccacgttagaaataggaaggaccttccgggaagaaggggaaaggggcagagctgggcaaagccccacagcctcaggcaggaggcctgggtgagcactgcttctcaggcctgggagggagagggtcctggtgtggggtccctgctgagtctgagggaggcagtggggtttccctttctgttttgttagggtcttcaagaagtcgagccctaactgcaaggtgagtctccacagcacttacccttttgaccctccctgggccccaacaaagcccagccttcccctagacgatccccaacctacccaaagatgatccccaacccctagctccccacttcctgtgacagctaagcgccgacttccttccctcctgaagccccttgccgcagaggctgctcagcctgagccagccacagggctgggtggggcaggcttgggtccccaagcaagaccacagaggaggaggccaaaagcaagccatgtgcctgtagccctcctaggagccaacccaaggtgcgtggggctgggaaaacctaacagcccccgggctatggcctatttatcctagagccccttgaggggacctagtgagggtggcagctgctctctagctggctggttgggctgagttctccccgaggatccaaacacacacacacacagacacacacacacatacacacatacacacacacctggctggttgggctgagtcctccctgaggatgcaaacacacacacacggacacacacacacacacacggacacacacaaacacacctcgctggttgggctgagtcctccctgaggacacacacagacacacatgcacatacatgttcacacacacacctgactggttggctgaggacacacacacacacacacacacacacacacaaacacacacacaccgggctggtgggcagaggtgtgcagagataaaggagcagctcaaaagcctaaaggtccactagtctgagaaacgccaccaccctcactttccaacactattgggaggaaacctggaacaactccttcctgatagcccagcctggagatccccgggcagggcagccagttttgagggctccgatgccctgtcaccatcctccccaatctcccctgtgaccccttgacatcctcagctcaccgtgtacttgggcaagcgggacttcgtagatcacctggacaaagtggaccctgtaggtaagttttcccagaaagggacagctcgttccccaagaggggaagaagttcccgggcccaggaaagcggggagcggccctttcaggaagtgagctggtgtgtccccctcctagatggcgtggtgcttgtggaccctgactacctgaaggaccgcaaaggtactggccccaagtccagggggcccagggaaagtgggggctagggaagtgaaatgggctggccttggaagggcgccccagagagatggaggctggaggtggaagccaggagtagggttcaggcaagtcttatgctgctgagggaggagcagcggctgctaggtgccaggggactggggaagtggggctcctgaccactcatctcaccctcccttgccagtgtttgtgaccctcacctgcgccttccgctatggccgtgaagacctggatgtgctgggcttgtccttccgcaaagacctgttcatcgccacctaccaggccttccccccggtgcccaacccaccccggccccccacccgcctgcaggaccggctgctgaggaagctgggccagcatgcccaccccttcttcttcaccgtgaggatgcccctgccctctgagggccagggggctggggctgggactgtgtctggggtgggggtaaggcactgctgtgggcagatctggaagaaacagtgaggcagggaccctagatccacttcccttcagggtcccagtgcattcaggaagcccttgattatctgcctcctctctggggccccttccttcttcccttct[136 bp omitted]tgcctcagcctcccgagtagctgggattacaggcacgcaccaccacacacgactaattttgtatttttagtagtgatggggttttgccacgttggtcaggctggtctggaacccctgacctcaggtgatccgcccaccttagccttccaaagtgttgggattacaggcatgagccaccacacccagcgtctccagcctcttaggttgagatttggaggaagatctgggggctttctggaagaactgaagtcttctccttcctccgccacagataccccagaatcttccatgctccgtcacactgcagccaggcccagaggatacaggaaaggtacgggaggaacagctctgagggctcctagggcaggacatgggccagcaggagcctggaggcacagctgagccagagggtgaactgtcgagatgccagggtggggccgagggtaggccagtgtcccccgtggaagtggggcgtatgtggtggtcattgtgcacgcatgacactgcctcctgctctgtggacccgcatggatctggggatgggggctccccttgcactaccatgaccaagcctctgccaggttctgggctttggagaggaagaagacttagtccccagggtcgtgagaccacaatgaggcaagagtccctgcccgagaggagggaagggggaggaagaaagggcagtgatggtggcgggagcctccggtaagatgtggccttttctcccctccccgaggcctgcggcgtagactttgagattcgagccttctgtgctaaatcactagaagagaaaagccacaaaaggtaagggaagtgacctcctctgtggtgtaagaggaggctttcctccccgcttccaggagcccaggccccgtgcgggggaggagtagggttggggtgtgtgaggaatgacccctcctgcccctactctgatcccaggaactctgtgcggctggtgatccgaaaggtgcagttcgccccggagaaacccggcccccagccttcagccgaaaccacacgccacttcctcatgtctgaccggtccctgcacctcgaggcttccctggacaaggaggtggggcgtgagagggtgacacggatgccacggtgcagtttagaccctgggggaggggcgaagccacacatcaagaggacatttgtaaaggaggttgccttggctgggtgtggacagttgccgtgggcttgggtttgaggggagggggccagaacaatgtgtctgtgtttggggacacactgatgatgggaacagtgaaaaccagttccaattcacatgaccccctccccccaaaagctgtactaccatggggagcccctcaatgtaaatgtccacgtcaccaacaactccaccaagaccgtcaagaagatcaaagtctctggtaggaggtggggtttggaagggggtcttcggggagggcgttactgcacaggtggctcctggtgtgatctcagcccaggccatttcccagtgcgggagacccaccagggctcaaagaatttaggttgttccataatgatacggggagcctcggtgtttactgcttcagtggggagcatgggggggccacgccacggggtctggagttgtggtgtggtggtggcttgtgctccatccagagctgcctgaccccgtcccaccccacagtgagacagtacgccgacatctgcctcttcagcaccgcccagtacaagtgtcctgtggctcaactcgaacaagagtgagtatcgggagagacccatgttccaatctaggggagaagagcaggatcaggagaatgtgaggtggaggaagaattcttcctgagccatctccacctttttttttttttttgagatggagtttttgctcttgttgcccagcctggagtgcaatggggcaacctctgctcactgcaacctccacctcccgggttcaagcgattctcctgcctcagcctcccacgtagctgggactacaggcatgcaccaccatacccggcttatttttaatagagacgaggtttcaccatgttggccaagctagttgcgaacccctgacctcaagtgacccacccgtcgcggcctctcaaagtgctgggattacaggcgtgagccgccgcgaccggccaccatcttcacttaaaagggtattccctccacagccaggctccaggctgttaattttcttgagcacgttgagccaaaacctactcccttgtgacctgtgcccaaagaaacaagggactagtgagggggagatgctgcttgggggtcataggccgccccttgcccagcccagcgcccctaagcatcttgttctcttgtccccacccccagtgaccaggtatctcccagctccacattctgtaaggtgtacaccataaccccactgctcagcgacaaccgggagaagcggggtctcgccctggatgggaaactcaagcacgaggacaccaacctggcttccagcaccatgtgagggtggggctggggcgggtcccctgcaggccaggggccagacgtcggttcagtgctctatcctagtgtgccagggatgtatcagtgaacagaagagacaaaaagaactcttacattctaggggagggaggatagccaaatctgatcagtggtcactgtacagcaggtttagtgacaagtatgaaggagaaaaagccaggcagagaaggaagggatggggggcagtgaggtgcgaaggtgaattcggagtaaggacccagcggaagtaagcaatgtgggtgagcaggaaaggagggttctgggcagagagaaaacaaagactcagaggtggggcagcctggggtgttggaggaatggggaggtgccatcgtgccctcgggcaggagcagccctggaggtccccagcttcacaaagggctggatttcacctctccggatgcctttgttcagggttctcactgcacagccacacacagcaggcccggagggcaacttagggagaagaactaagtaccaggagaggaggaggaggtgaggtcaggggctaatggagagccagacggtgcaaggctgttagcggagaaggacgtcagcttttcctggagaggagccaaggaggctctgagcagggagtgcagtgcgcactgtaccataaccgcacggcctgggctgctggggccctgggggcctgtgcgagtttgtggtcctgcccagagtccccgtgggaaccccacggtgggccaggtgacagggtgataggccctggtctgactccaacaccctcaattgcagcgtgaaggagggtgccaacaaggaggtgctgggaatcctggtgtcctacagggtcaaggtgaagctggtggtgtctcgaggcgggtgagtgtcatgggggagcctgggtgggggtcacactggctctctctagtcccatgtcgtcgtcctcttcacgatgcctctccccttccccagggatgtctctgtggagctgccttttgttcttatgcaccccaagccccacgaccacatccccctccccagaccccagtcaggtgagcacactacccaccccaagccctcagagggagggcctgaagcagggccagtggaggaaaactggcccttccagcacccacccccacaccccctcttcccgtccccccagccgctccggagacagatgtccctgtggacaccaacctcattgaatttgataccaagtaagaaactcattcccctacttgaccctcttgggacaaagattcctataacattcaaatctgccctcatacctcttccttgcttttggtggggagaagcggattgtagcatcaaatcaagatgccttagccttgtgaggctgcctcttgctgccttttctttgtcccttcctgtaaatacctctggtcccactgctgttcgaacgcctctgtcccagaggcctagcttcggggagggcagggagtgggaggctgggacaagagtcagaagccctcacctcacaaccctctttcccaccaccaagctatgccacagatgatgacattgtgtttgaggactttgcccggcttcggctgaaggggatgaaggatgacgactatgatgatcaactctgctaggaagcggggtgggaagaagggaggggatggggttgggagaggtgagggcaggattaagatccccactgtcaatgggggattgtcccagcccctcttcccttcccctcacctggaagcttcttcaaccaatcccttcacactctctcccccatccccccaagatacacactggaccctctcttgctgaatgtgggcattaattttttgactgcagctctgcttctccagccccgccgtgggtggcaagctgtgttcatacctaaattttctggaaggggacagtgaaaagaggagtgacaggagggaaagggggagacaaaactcctactctcaacctcacaccaacacctcccattatcactctctctgcccccattccttcaagaggagaccctttggggacaaggccgtttctttgtttctgagcataaagaagaaaataaatcttttactaagcatgagtgtgtgttttctctgtagtgtttagagagtgtatggtgtgcttatccatgattctgttagcttgtgggggaggacccagtctctcttctgcacccaaaagccacctgacacggaggctatcagcaaatgtttattggatgactgtgctgtggctgtgttccagggtaaacatcaaaacttgacttagtccaaactcaagggtgaggcttgataaggccacaaagtgaacttagtcatttctagaggtcacagtaactaaactaactcgcctgcacacagatgctcacgggagctagccagggcaggcccttccctgttgcggccgacgcacatgaccacctgtgacctgttgtgaccgagtcgcgttcatttccactgctccttatggctgctcgagccatctgctcctgtggctcagcggtgccacaaccgcaggcctcaccagacaagccacgtgacgtctctggagtctggtacctacattctaacacagaagctgaggcttgggcagcaagaacgtcatgctgccgtgggcccctgtcctagggaccacatcttagtgctgttcatgggatattcatcagggactccctgaggcttgaccgaagccccaggctgggctggagggaggtagcatcactccacgaacatttctcacctccatcatctgcttccactcctgaagcccaatctttctcctaaagctccttcatgcattccacaaacaatctggatttgagtccctacaaagtaccaggcatagtatagcagtacaacaacaacaacaacaacaaaaacacattaattcattcccttttttttttttttcttttgagacagagtcttgctctgtcgtccaggctggagtgcaatggtgccatctcggctcactgtaacctccgcctcccaggtacaagtgattctcctgcctcagcctccggagtagctgggattacaggcgcccgccacaactcccggctaatttttgtatttttagtggagatg[139 bp omitted]cttcagaggagaagtactggagccaggagaacgcgtgacagggagttctgagctaggttgggtttggggaagatttccctgagaaagtgacctttaagcagagaagtgaaagatgaggggagttcggggaccgtccagggatgagcattctgggcaatggcagtgtcgtgtgaaggcaggaggaaacaacacatctgggacctaaagaggccagagagactgggacagagacagccagaggcaaagtagttccttctggctgctgagccagatggggacagctcgcacaggcctttagtctatgttatgactcgtgacttctagttaaatcgccatttacccacaagctttaagtactgccaaaaggcccgtgaccttgcttaccccgccacggcggcagcctcccctgcagaacctggactttctcatgcggaagaacggaagaaccatcccgcctaataccatctccagcatccctccgactcccgtgcacctgctccttgacctctaagcccaggtatctcaatttttttttttttttttttgagatggagtcttgctttctcacccaggctggaatgcaatggtgctatcttggctcactgcaacctctgcctcccaggttcaagcaattcttctgcctcagcttcccgagtaactgggactacaggcacacgccaccacgcctggctaatttttgtatttttagtaaagacaaggtttcgccatact[135 bp omitted]catggtaaaaatccagagttgggctccacctttcccgattctgagtcacaaggtcccaagaagaatccaaaaatccggatttttaattagtacacactttgagaaactgccctttttatttatttaattaacttatttattattatctttttttgagatggagtctcactttgtcacccaggctgga[131 bp omitted]agagccaaggtctcgccattgcactccagcctgggcgacaagagcaaaactctctctcaataaataaataaatagtctaattcaatggcatttagtatactcacaatgttgtacaacaatcccctctgtctacttccaaacatttggcttcctgtattttcaataacagataaatttttttaaattgtctttcttaaggccgggcgcagtggctcacacctgtgatttgtaatcccagcactttgggaagccgaggcgggtggatcgcctgaggtcaggagttcgagaacagcctggccaacatagtgacaccccgtctctactaaaaatacaaaaaattagctgagcatggtggcgggcgccagtaatcccagctactcgggaggctgaggcaggagaatcacttgaaccctggaggtggaggttgcagtgagctgagattgtgccactgcactccagcctgggcaacaagaacaaaactccatctcagaaaaaaaaaaaaattctttttgctttttaggttcatacactaggaaaattttttatatttattttcatgtagtcagttataatagccacacaaaa[211 bp omitted]gagcaagagaatggtgtgaacccgggaggtggagcttgcagtgagccgagatggtgccactgcactccaggctgggtgacagagcgagactccgtctcaaaaacaaacaaacaaacaaaaaaaccagctgattgggtgttttgtcacaaagcttttggcccttctgttttctcactacttgacacttccttttctttccagcctatacttcaaggtcaccatatcaacccctatctcatcagcacactccaccctccattcacaatcctgttctcaatccacagcctggatccatccaactatctcccttctctgctctgaacacaggggttggtgctcatacaaccacttgcttgttcattcaacacattttgtttttgagacagagttctcgctgtgtcacccacgctacaatgcagtggcccaatctcgactcaccacaacctccgcctcccgggttcaagcgattctcctgcctcagcctcctgagtagctgggattacaggtgcccgccaccccacctggctaatttttgtattttttagtaaagatggggtttcaccacgttggccaggctggtctcgaactcctggcctcatgtgatccacctgcctcagcctcccaaagtgctgggattacaggcatcagccaccgcgcctggccaacaaacttttttgaactcattctaggtaccagacactaggtatgaatctggggctgctaaaaatatatggtctctaacccaaggtgggcccccaacacccgataagcttttgtctctctccatgtccctggttacctccctctcctgctcccatcctatgcactaattcttttttttttttttttaaggtggagtttcactcttgttgtccaggctggagtacaatggcacgaccttggctcactgcaatctctgcctccccggttcaagcgattctcccacctcggcctcccaagtagctgggattacaggcgcccgccaccatgcctggctaatttttgtatttttagtagagacgaggtttcaccacgttggccaggctggtctcaaactcctgacctcaggtgatctgcccgcctcagcctcccaaagtggtaggattacaggcgtgagccaccacgcccagctacctacgcactaattttctaccttcctcatgctcaaagtgacttctgtttttcacagagattaggcaatgaaggatgaataatttcaatttcccacctcctactgacaaacagtgacatctacaccaattctcctacacaaccaaggttaagatgccttctccagttcaaagctaatccctccacctgtgctcagattgctgtcctcccacctccattgagaccttgattcaccaaaccacacccctctcctacctgtgtctatggctcttcctccatggtaaataagcccacataagtctattccatttaaggaaagaggagggaggaagaaaaaaaagaggaagaaggaaaggacaaaccaaacaaaacactctcctctacacttacgtctcttttttatttcctctcttctttggttttgttttgttttgttttttgagacagattttcgctcttgtcacccaggctggagtgcaatggtgagatctcagctcactgtaacctccgcctcctgggttcaagtgattctccagcttcagcctcctgagtagcttggattacaggcacccaccaccatacccagctaatttttgtatttttagtagatacagggtttcaccatgttggccaggctggtctcgaactcttgacctcatgatccgcccgcctcggactcccaaagtgctgggattacaggcatgagctactgcacccagccctctctcactcttcattctttctttactttttgttttcaaagttatatatacatataaagaatcagatagtactacaagacctattacaataaaaagcagacccttcccactctaatttcctcctcctcagaggcaactactttcaccaccttttttttgagacagggtcttgctctgtcacccttggcatgatcacagcttactgcagcctcctcgatgccccaggctgaagagatcctcccacctcagcctcccaagtaactgggactacaggtgcaagccaccatgcccagctagtttttttaacttttttgattattttattaatttgtttttttgagacagagtctcactctgtcgccaaggctggagtgcagtggcactgtgtcggctcactgcaacctccgtctgctaggttcaagcaattctcctgcctcagcctcccgagtagctgggattacaggtgtccaccaccatgcccagctagtttttatatttttagtagagacggggtttcaccatgttggccaggttggtcttgaactcctgacctcaggtgatccacccaccgtggcttcccaaagtgttgggatgacaggcgtgagccaccgcgcccggccagtttttttattttttgtagagatggagtatcctcacgttgctcaggctacacctggcctactttcaccacctttagatgtttattttggcatttacctccctatctctaaacatgcttatttggcaacttcatgatttttgtttttgtttgttttttttgttttgagagagggtcacgctctgtcgcccaggctggagtgcaatggtgcaatctcagctcactgcaacctccgcctcccatgttcaagcgattctcttgtctcagcctcctgagtagctgggactacagatgcgtgccaccacgcccagctaatttttgtatttttagtagagatggggtttcaccatgttggccaggatggtttccaactcccaacctcaggtgatccgccagtcccggcctcccaaagtgctgggattataggcatgagccaccacacctggcttgtgtgacagatttttttcattacttccctcatggtttgatttttcaagggtgttttgtttgtttgtttgttttgtttttgagatggagtcttgctccaaattgcagtgttactgataccttctagtcttctgaaaataatgtttgtggaggaagggatcaagaaatgtagcaccatcatttaaattccctcaggaccaaccctactggacacataaacaatagcaacaacatctactttcaataaaatgttggcattgctctctgccaattaccttgagagcctgactctggaatgaaaagctctataccgaccctggccttgaactcctgacctcaagtgatcctcccgcctcgacctccaaaagtgctgggattgcaggcataagccaccatgcccagccaaggatgctttttcggattcaatcatgttttatactatctcttacctaaaagcttcaacagttgtccccacctccccctttttattttggtttctgtctttcatgttagaaagtttctttacatacctagaaatttttgctttctgctcacatttaagagcgggtgcttagcttgacatggtggctcacatctgcagtcccagctactcaggaggctgagacaggaagatcacttgagcccaggagttcaggactacaatgacctatgattgcgccactgcactctagcctgggtgacacagagaggccctatctcaagaaactaaaaaaaaaaaaaaaagagtgaggtgccaagaagttgactagaatttccatgtacacagttgggacttgccaactgtgagtttcagtatgaggtgatctggccaactgactggttggagaacccctgacgttcacatcgtaaggtcttttctcacttaccaaattccccagagaagagtcttccagtctcttacctggaaagtataagccttgtgctggagttctggaaactaccactcactatataaactttcgtttttgtttttgttttttcttggatacagggtctcactctgtcacccaggctggagagcagaggcgtgatgaggactccctgcagtctcaactcccaggctcaagcaatcctcccacctcaggcccctccaagtggctgggactatttttatactttttgtagagttagggtcccactatgttgcccaggctggtctaaaactcgtgggctcaagtgatcctcctgccttggcctccaaaagcgctagaattacaggcatgagccaactcacctggccctaaactttcacttaatctctgtttttcttttttggagactgagtctcactctgttgcccaggctggagtgcagtggcacaacctcggctcactgcaacctcctcagcctcccaagtagctgggattacaggcacccgccaccacgcccggctcattttttgtatttttagtagagacgggggtttcaccatgttgcccaggctggtctcgaacttctgacctcaggtgatccacccgcctaggcctcccaaagtgctgggaatacaagcgtgagccaccgcggccggcttaatctctgttttcaacgcagtacccttgccctcaactgtactcaggtgctctctaagctaaaaaacctgttttccatttccgacaaactccagtattctgatgggttgggggagatcggttgccaagatatatagagtcaataaagagatctggaggtctaacttcaaataatcctcctaattttagtaccactttcaccccagctgtaagcgatgctactaatttcatggtaaatcaggttgcttgtaagctttctttgctgctggcttagttaccacctcactgcaaaatgagtctgttttccagcatctgtctaaagttttgctattaactcctctccctttgactcctttttaaaacaactttaggccaggcacagtacgctcacacctgaaatcctggcactttgggaggccaaggcaggaggatcctttgagtccaggagttcaagaccagcataggcaacacaatgagaccctgtctctacaaaaaaaattaaaaattagccagatgtggtagcacacatctatggtcctgactcttcagaaggctgaagtgagaggtcacttgagtatgggagtttaaggctgcagtgagccatgactgagccactgcattccagcctgggcagcagagtgagaccttgtctcaaaaaataaaattttttaaaaaaagcaactttctgttattttattagcatttagggaaggattaagtcaaatgccagacccatcaagttttttgttttttgaggcagggtcgcgttctgtcacccaggctggagtgcagtggcacaatccatggctcactgcagcctcgacctctcaggctcaagaaatcctcctatctcagcctcccaagaagctgggaatacaggcatcagccaccaagactggctattttttttaatttttaatttatactttttaaaaaattatttgaatttatttatttattagagatggagtttcactcttgtagcccaggctggagtgcaacagcgcaatctcagctcaccgcaatctccgcctcccaggttcaagtgattctcctgccttagcctcctgggtagctgggattacaggcatgcgccaccatgcccagctaattctgtatttttagtaga[143 bp omitted]tcactatattgcccaggctggtctcgaagtccttagttcaagtgatcctcccacctcagcctcccaaagagctgaaattacaggagtgagccaccatgcccagcccccaaatttttttataaagacagtatctcactatgttccccaggctagaccattcagtttaactgagtctaaccttcatgtgctaaccttgggcaaactagtttcattcttgataatctactataaactgttacaaacgatctttccaaaaaaggtaattctggtcataacacacttcttaaaaaccctttaaaggctcaaatgtcttcagactcaagtccaaagtacatagcttgcaagccttttcctgattccgctcctctctccagcctcaccattgtcatacctaacccccaccacgctccgttcactccaggcaggcagaatcccttgctggactccacatgcgctgttcccgtcacagcaccatgctgttgcctatgccgtc[217 bp omitted]gaagcaggagaatcgcttgaacctgggaggtggaggttgcagggagggagatcttgcgactgcactccaacctggacgacagagtaagactgtctcataaataaataaacttgtgtagaataaactagaggccacagacagtgtcaagaagatggacaggtctgaatggcctcgggctaggggatattccactgtcgcctctgactacgggtggtcctgtggctgaggcgcagcgggccctgggagttgtagttcatcaagcggaccgaggaggcgaggctgcgctgagcatcctgggaatcgtagtgctcgctacacggtgccctctgcgcaggcgcacaccgagagccacttccggaacaagcgtcgcgtttctgaggagaaactcttggtgagaattcccagagtgataatggctacctacagcctggcgaacgagagactacgcgctctggaagacattgaacgggaaatcggcgccatccttcagaatgcaggttcgggatgcgacaacctggacagcggggagcgaaagcgtgaccgggctgcactggcagcctgacctgggacttggagcagggttggggagggaatcctacgtgcgtgcgcagcgaaagggcgggactgagaggggctggcctagggagaggctacactggcagtctccgtgtgtccccgccctctctccgccctggcaggtactgtgatcctagaattgtccaaggaaaaaactaacgagcggctcctagaccggcaggcggcggccttcaccgcttcagtgcaacacgtggaggcggagctgtcagctcagatccgctacctcacccaggtcggtgtgtctggggggttctgcgagcgaaccccagctctgggtcaaagcctcaggcttgggtgatccagggtggagcattaactgggcaggaccagacctccccagccggccatccagagcgggtttcttcctctaaaaggaaagaatgggccgggcgcagtggcttgacagagttcgagaccagcctggccaacacggtgaaacctcgtctctactaaaaatataaaaattaggccaggctcggtggctcactcctgtaatcccagcactttgggaggctgaggcgggtggatcatctgaggtcaggagttcgagaccagcctggccaacatggtgaaactccgtctctactaaaaatacaaaaattagctgggctggtagcgggcacctgtaatcccagctacttggaagggtgaggcaggagaatcgcttgaacccaggaggtggaggttgcagtgagccaagattgcagcactgcactccagcctgggtgacaaagcaagactgtctcaaaaaaaaaaaaagccgggcttggtggtgagtaccggtaaccccagctacttggaaggctgaggcaggagaatcgcttgaacccaggaggcggaggttgttgtacttagccgagatcatgccattgcactccagcctgggtaacagagcaaaaactctgtctcaaaaaataataaataataaaatgaaagaattaaaggtggccctgcatacctcactgggtaacatcacatgtgcctagcagaagatgtgtaaataatgctagaactacagaactttgtcactggaaacttggcctgacctccaggccacgaggtcccaaatccttatatcctgagaagagggacaggattgagaaggttctgaaatcgtcgcagggaccactaccattactaatttttacggtgtgccagatactctgcattactttatctaatcctcaacaactctaggaagtagttattgtcacccccattttacagacaagattaacataagttaaatgatttatttacccagctaccagatggcctaacaaattcaaactcagggaagaaatgagacgagacctgatgcctggttggagttagggtaaaggagatggtgctccattgatagtctgtcttgtaggtggccacagggcagccccatgagggctccagctactcttcgaggaaggactgtcagatggctctgaagcgagtggactatgcccgcctcaagctcagtgatgtggctcgaacctgtgagcagatgctggagaactaggccagggagatggacccagagctgagagggagaccatcacctgtgccatgggacagaacctgggaacatgtagggtggggagtatgagcaccaacataccctgctggtcaaagtaccctaggacaaaggggcaaatggtgggcatggaaaaactgaagcccgagcctgcccacagctatgctttggcctctccagcagggtgctcctgctctgcactccagaaacaccctgacaggctcagagaggagatggaaactgacatacccaacccacttcctcaaacacttcatgctgctgccccagccttcccgcagacttggcctaatgaaaatacatacttcttcattcggagagacaaaacaagaactagagttttaatgataataaaagcaataataataaaagcaataacaataaaaacaagatcagactctcactggggtaggcaagggactgaggaggtgaaaccaacccgtatggtgtcccagcacggcacctgctaaggagggagggtgggaaagcccaggccttcgctgcgggtacaggaggatgcaggagagggctgaggtgggggaggaacaactggtgtactgggagagagatttgggacgagggggaaccatcagcaaaaaatgaagccaggaatcacagtaagggcgcaagggctgaggccagttgtttccataaagaagactcaatcattacaaaaataatttttagtagttaaaaaacacacatagggccaggcatggtggctcacacctttaatcccagcactttgggaggc[135 bp omitted]gcaggagaatcgcttgaacctgggagatgggggttgcagtgagccgagatcatgccactgcactccagcctggatgacagagcgagactccgtctcaaaacaaagcaaagcaaaacaaaacaaaatacacatagaatttgtccaagttattatcacccagtgtgaaaagcagattttatagtataaccgtttttaaatgaggggcctaagagagggcagtggctggttagtcctatgttagatattaacaaatacgtgtaggctggatgtggtaggtgacgcctataatcctcgcaccttcagaggccaaggtgggaggatcacttgactcaggagttccataacagcctgggcaacatagagtccgtctctaaaaaacaaaaaacaaaaacaagtatgtatacagtgcctaccatgttgtcaggggtcagtctcctttattacactttttgtaagaataagccacagtttaccctcacaagcttccattcttggctcaggtattagagtcaggtgccacaggtatataatgaaccggcagatctggaaaggataaagaaattgagagatgagctctgagatcaaggacagtgtttgggggatgatagcttgaactagggaatcagatgaagacatcaacactatgacctggcccacagtaggtgctcagtgaaaatttgtgaattgaatgactggccctcacctccctccacagcttcatctcccactagcttgctctagccatcttctccatgatgttgctccaagcactagtccttgtgcctgtggtggcttccttccctctccactgtctacagtccccgactgactgtcctcagagggcccagagtcaaccttgtgcagacaaccttgatacttgtgtgccaaggccaggtttccagccacctgagagccactgggtcaggatgcctgtcaggaaggctctgggtccctggggggagggttcaaaggtccagtttacctggagaggactgcggtgactgccccctcctcctcttgcacagcacataggaaagggctgcggtgaggatgaagatgatggccaggaggcacaggactggcactgtggctgatgtcctggctgtgggaccagcatttttttccggctgcttctggttctccccagcctcaggcccagctgccagactgtggcccgcagtgtgaatggtggtttcattgggacgagtgagctctttgtccgaggacagtgatcctactgggagggtggggcgctgagtggactgcaaggtggacaggagcatctgggcaggggtgtggatatctgaagatgccccctctgaggcctgagaaattggggggctggtaggaagtaaatgcttctggtgggccacaatccccgagtaagcatgtccacattctggaaaggaaagaaatgaggaatcaggactatcaggagacaaggtgaaaaagcagatagaggtgtaggggagaaaaagtaatatcttttcctcacccatcgcaagggtcaaggctgatacccctataaataaaaaacattaacaagagaaaagcctaacatttatttaatcacagttttacatgacataggaaccttcagaaacaaagacccgagaaaagtgcatttttatgcttaggcttgctgtga[131 bp omitted]catggagaaacccagtctctactaaaaatacaaaattagccaggcatggtgtcatgtgcctgtaatcccagctacatgggaggctgaggcagaatcgcctgaacccaggaggtggaggttgcagtgagccaagattgcacaactgcattccagcctgggcaacaagagcgaaactccatctcaaaaaaaaaaaagaagtatgattggacaaaaagggtatgatctaatggcaataaatggggggtgggggaccagcaaggcctgtccagattcttcttggcctccaagtatagggcaggacccatctgaaatgagagcctatgacctacttccacgtgaagttagagaattcctttatggccagctctcacagaaaaacagagcagagtgagctacttacttctgctgttttcgtaattaccaaggtgccatgttttggagtgtcatgttctgagctccaacagagggaagagtgagtcagggaggttatcacgctgaaggccagaagaggaaggcagatgacagacggaaaaggtaggggacaaggaagtgagcgaaccacgagacaagtgggtgtcatgaactgggaaatcagaagaccagggttggattccaagctctgctgtaaagtagctgtgtaacctcaagtagctgtgtaacctcaccccttgtccctaacctctccggaagtgatatcttccagctgtaaaatgaggataattgtagtaccaagggccagggttcctgggaggatgaaaggaaatcatagaggtctaggcagacttaaaggcagtatggatgacacagatcctacaaaactttagctaggacatggaagaaccttttgtattttaatggttgtatatttattttaagagaaaaatataaccaatgcatcaaacttgtgacttcacagatattattgcttaggataatttactatttaagttttctttctttttttttgttgcccaggctggagtgcaatggcctgatctcggctcactgcaacctccgcctccaggttcaagtgattctcctgcctcaacctcctgagtagctggaattacaggcacatgccaccatgcctggctaattttgtatttttagtagagatggggttttaccatgttggtcaggctggtctcaaactcctgacctcaggtgatccaccggcctcaacctcccaaagagctaggattacaggagtgagccaccgtcctggcctctacttaagttttcaaaactagtttgtgcacacttaaaagtaattcatttcattgtatgtaaatttgaactcaaaagaaaaaaaagcattaaaatattgaactctacttaatatacatgctgaaatgtcttgggatgaagtgcaatgatgtccacaatctgccttgaaatgcatcaagaggccgggcactgcggttcacacctgtaatcccagcactttgggaggctgaggcaggtggatcacctgaggtcaggagtttgagaccagcctgaccaacacggtgaaaccccatctctactaaaaaaatacaaaaattagctgggcatggtggcgggcacctgcaatcccagctactcggaaggctgtggcaggagaattgcttgaacctgggaggcggaggctgcagtgagctgagggcaccattgcactccagcctgggcgacagagcaagactccattaaaaaaaaaaaaaaaaaaaaaaaagaaatgcatcaagaaataaggtgatggatgatggatagaagaatgaatagatggatacttaataaagcaaatatcgtgtaattgctgtaaaattgatagtgtaaaatatatgtttatgtaaatatgtaaaatatacatatataaataaaattgtagaatctaggtggaggcactggatattcagtgtgccattctttcaacttttgtatatgtgtaaattttcataataaaatattggaaaagaaaaataggccaggtgtggtggctcacgcctgtaatcctagcacttttggaggccgaggcgggtggatcacaaggccaggagttcgagaccagcctggccaacatggtgaaaccctgtctctactaaaaatacaaaaattagccaggcttggtggtgcgcgcctgtaatcccagctactcaggaggctgaggcaggagaatctcttgaacctgggaggcagaggttgcagtgagccaagatcgtgccactgcactccagcctgggtgacagagtgagactccatctcaaaaaaataaaataaaatagtactttgatttcaagaaaaatattaataagtagacaatagcacacgtggtagaatgaattggcaaaactcatgaaggtgatggtgaatgatcaccccgtttggcaaacagggactcgagtctaagtactttggacaggatcagaagaaggttctaggaatgtgcggccccaggggaaaaggctcaggtaaagaaaactgtcaggtggaagctgctaagccctggaggcagagcctgaagagcagtggaaaagtctcacctttgagatcaagacagctcatcaattcctgaacccatgggtccttgttgcccccacacacgctccaggaaaggagctggaacctgcggaggagagacctgggcttagctgcggcgccttctttccttccccggctccttcctcattccagaggcgtgaagttgccaccaagaaagagccctttctcctgggactgggaaactccccagtaggtgagacggagtcatgaagtttcggggaatgagagcaaacggaacccggagatggggctcggtgagccgggaaggagttcaggctggaccagagagggtcctggaggcacctgcaaggaggggccgcccaggcgctgccctcgcagaggcaggtaaaattacctcgtgtagtatagacaccgatggtaagctctcaggtgtttccggagacgattcatgaactgaaccgatggcggggagtcggaagaaattcttttaccacaataacaacttccagtgacgctgccctcgttgccattgcctgcgcgggacggaggtggtcggcacccattcccaggcccagggtccccactccgctgttccctggcatccaatccacagccccatgacagcctctcggtggacccagggtcagagcgccaggctcaacccacacatcatcacgcccccgacaacatccataatcccgcccggagccaggcgtccccgggcctctgtccccaaccccaggcggctggctggctttcctcttgtccccgctgccttcatccactcaactccgtgggcctcgtgtcccctccccaactcacccccttcccgtgacaggggaatctgggtcccctgccccgcccccggctaacctggctgagtcaggtacaccagcaggagcagaagcaggagcaggagcacgcgggacccgggccgcaagtcccgtcccatctcggggctccgcggactctgcggggatggagccacctcgctctgactcccagacatgctccggcgcgtgacgtccagctggtgtctcaatggctttcgccggggaccggaggagacggcggccggagaggaggcgcgagccagctgcaccccccggccctgctgtgccccgaccgtgcgctcagtactcggcccgcgccatgccagcctctggacgcagggaaagccgaggaggtggagctcccgcgccctgcgcccccgcactgggcccggctccgtcgagggaaggccaggaatcttggaagaaaccgaaagaaaactccggcggcgggcgaggaggggcgggaggacgacggcccgaggagccgattcggttcggttcaggaggccgcccgcctggcccgtccgccgacctgtgaggcggctgcactgccggaccggccctcctcctccgaggcactttcacttccccgatccgggcgccgcgggacccagccgcgctgcatgagcctcccgggcggcccggtggagagagtcgccgccagccccggccgcgcgcacctgcggggcagccacccgcggacgcaccgagcccggggggcgtggccgcccgctgagccggcgagggctcgggcagccctgacgtcacaaccgcacccgcgcaccctccaccgcgaggtatttaccttcgaaaagtggtggcggctgcaggtaccggaggagtggggcggccgggaggggctaggtctaccggggctgcccgccacgcagatccgagcccagggaaccccctcgctcccactcccataccccacagacgcatccaaaatgcttccctccccaccaaaccgttcccgataggattagccctctctcctctctagccttaatttaaactctgcttttgagggtgtgaactctccaattttaagccccaaataccatctcatccctgagtagtcttctccaaccctggtcacccactttcaagtccagcccccattttcctccctaaactcccatcctcagccctgaaaaatcctcttctccgctcctagcatatccacggatccaaccctaagtgactctcaaacctaccctctccctcaatttgtgacccagccccaaactccatcattgctctcctgtccctcaccatatatcccttcttttgctcagtctgggccggggccctgtgccgctgaagacatggagtttgtgtctggataccgggatgagttccttgatttcactgcccttctcttcggctggttccgaaagtttgtggcagagcgtggagctgtagggactagccttgagggccgctgccggcagctggaggcccagatcagaaggctaccccaggaccctgccctttgggtgctccatgtcctgcccaaccatagtgtgggcatcagcctggggcaaggggcagaaccaggtcctggaccaggcctggggactgcctggctcctgggagacaaccctccactccacctgcgagacctgagcccctacatcagctttgtcagcctagaggatggggaggaaggggaggaggaagaggaggaagatgaagaagaagagaagagagaggacgggggtgcaggcagcacagagaaggtggaaccagaggaggaccgggagctagcccctaccagcagggagtccccccaggaaacaaaccctccaggagagtcagaggaggctgcccgggaggcaggaggtggcaaggatggctgccgagaggacagggtggagaacgaaacaagaccccagaagaggaagggacagaggagtggtaagaacccagggctggccctgccctaccccttgcccagccatcctcccttcggaagccctcccctgccactagttctgagtgctggccttcaggccaatctggcctgaaaaggtgtttttattgacccacagtggggtttttttttttaatttaatgtttaaacattgcaagaaaaaaagtatccagaagtctggatttacacattcccaagaaaaatctcaagctctgacagtgggcctacatttctgcatggcagcgcattctggtcctctgtagcagctgtcccctttagaaggagcgtgccctctctacccagagccctttactcagtgaggttacttgcctagccccgtaggtatttgagtttggtactcctgaccctgaccacatttgtctctcgctgccccctaccacctcaacttttccctctttccccagaggctgcccccctgcacgtttcctgtctcttacttgtgacggatgagcatggcaccatcttgggcattgatctgctagtggatggagcccagggaaccgcaagctggggctcagggaccaaggacctggctccttgggcctatgctctcctctgtcacagcatggcctgtcccatgggctctggggatccccgaaagccccgacagcttactgtgggagatgcccggctgcatcggtatagaaatctggtatctgaggctggggaggactcgggccctggattcccaagcacctcctccagcctgatgccatctcccccccaactgcatttagagagctggagagcttggtcccaaggctaggtgtgaagttagccaaaaccccaatgcggacatggggtccccggccaggcttcacctttgcttcccttcgtgctcgaacctgccatgtgtgtcacaggcacagctttgaagcgaagctgacaccttggtgagcagccccaaagctgggggagaggaagaccccaataggcaaatagaaggaaggcagggtggtggggggcgcctagcagacagaaggagaggcagggacatgagaagatgcagaggaaacaatacagactgttacaggcggttagagggtgtaagacaaacagaccgagtgacatatgggcagctgctgggcagttgaacagcagacaggacctacagaggttaacactaggtgcccaccacccgctgtgtccccagcccccagtgtagtgctgtcttgtattgtggagaggcttgtctccgggctgactggcagcggtgcccagatgatgtgagtcaccgattttggtgcccaaggcttgcagccttcatggagcgggcaggagaactggcaaccctgccttttacctacaccgcaggtaccataaggaggtcagaatggttgggggaaactgggaccaggtctttgagactgggaattagatgtctgggaacagggtcctgcagttgaaggctgagtgtctggggctagagcctagatccctggaacaagggcaggggctgggtgtttggggctggagacagggtctctgaagccgaggcctgagtgtctgggtccctgagagcgtgcagggattgggggacagggattcaaacacttacttgcttcccagctccaccactaactgcagtgtgaccttaaacaaaccactttacttcttgaagcttccgtgtcctcatgagggatacggagaaggcccatggaattgttacaaggattatcttggcttggtgcctggtacgctggaggcactcagaaatggtagttcccggcctgactggaaccagacttagaaccagggtcctcgcgggaggctagggagagttcaaggctggggttctaggccgggcaatggttcacacccgtaatcccagcactttgggaggccaacttgagcccaggaatttgagatcagcctgggcaacatagactctgtctctacaaaaaatagaaaaaattagtcaggcatggtgcactcgcttgtggtcacaattctcgggagactgaggtgggagaatcgtttgagtccaagaggtcgaggctgtagtgtcccgtgatcacgccactgcactctagcttgggtgatagagcaagactctgtctcaaaaaaaaaaaaatgtctggggttctagcccagcacctcaactcctccccttctccttctccagaggtgaccagtgaaaccttcaacaaagaggccttcctggcctctcggggcctcactcgtggctattggacccagctcagcatgctgattccaggcccgggcttctccagacacccccgaggcaacacgccatccctcagccttcttcgcggtggtgcgtggggtctctccaggcatgggccccttggcctagagggaaggactgggaagaagttgtctgggtcccagatgatccctccacatacacactgacccctaccaacagcaccagggccatttcaggcctttcccagccctcaatggaatcacccctaccaactccacccagaaaccccatccctatgcaaacccccattcctcttactgcggctgtctcagggaatacagcccctttggaaggaagaaagagatgggtcaggtgggggtctccctgaccccaggcccctccttctttcatcctctcaggagacccctaccagcttctccagggagacgggactgccctgatgcctcctgtgcccccacatccaccccggggtgtttttggtgagctggaggggccctgtggaagctaggggtagggccagggactggagaaccagagcctgggtggctgtgaagaagaggtttgttagactagagggggtgggggtccagggccaggtcctctagcaaccctctcctgccaggctcatggcaggattactacacatggcggggcctcagcttggactcccccatagccgtgcttctcacctacccgctgaccgtgtactacgtcatcacccacctggtgccccagtcctgtaaggagagcggagtggggggtggagcaggatgggggagtgagagtggaccacatccttaaagcgctggtttttcacccagtccctgagctcaacatccaaaacaaacagtcactgaagatccacgtggtggaggccgggaaggagtttgaccttgtcatggtgttttgggtaagtcaccccaggcctgaaggttgggcattttggtatgggggtgggcacagggtagaccccagatctttctttctttctgtccttcaggagcttttggtcctgctcccccatgtggccctggagctgcagtttgtaggtgatggcctgccccccgaaagcgacgagcagcattttaccctgcagagggtgagggctgagggggccctgcttttcagccctgacccctccagtgacctcctggttgggtcctgcccttctgccccccactccccatcttgcctggtgcatcctccagttccctgacttccagtggcttttccaccccactcctggggcccctcaggacagcctggaggtgtctgtccggcctggttccggcatatcagcacggcccagctctggcactaaggagaaagggggccgcagggacctgcagatcaaggtgtcagcaaggccctaccacctgttccaggggcccaagcctgacctggttattggtaaaagcctgggtctcagggttaggcatgtggggaaggtgggagagaagcccaccgtgggagccagcttctccctcctctctgtctgcaggatttaactccgggtttgctctcaaggatacgtggctgaggtctctgccccggttacaggtgggcaatgggggcaaaagggaacttctctcccctcctgcctggcccctccccatctccttttctgaaagtctctgggctctcctcctcttcaccatcacctgctccacaaacctggggagtgcccacgggtccccctgcctctctctgtgtctgtctccgtcctccccctgctcccctccgcccggtctgtccggggacctcggctttcagcccggtctgtcattctggctgctgggatggatttggggaggggcctctcagagcgactctcgctccaccccagtccctccgagtgccagccttcttcaccgagagcagcgagtacagctgtgtgatggacggccagaccatggcggtggccactggagggggcaccagccctccccagcccaaccccttccgctccccctttcgcctcagagcggccgacaactgcatgtcctggtaagggtctgcgaccctatttccttcctgacccttaacttctcttactctctggctccacatcctcgaaggcccacctctaccctagtccctgctgtcctggggccctcctgcccccagcccagcaacctgccttctctgtccccactactcgtcgcccccatgggaggtctcgacatcccccagcacacccctctttagatctagctcacggaatctccccaacccacaaaagaccccgcgaccctccaacagacccaaccctgagtctagccccacgccctggaactcagaggggcaagccccgccccctggtccctgaccgcccggtggagccccgccccctggtccctgaccgcgcccctgggagccccgacccctgggagcgccgacccctgggagtcccgccccgtggtccctgactgcgccccgcgcccccgcaggtactgcaatgccttcatcttccacctggtttacaagcctgctcaagggagcggggcccgcccggcgcccgggcccccacccccatccccaactccctctgctcctcctgcccccacccgaaggcgccgaggagaaaagaaacctgggcggggggcccgccggcggaaatgaatgctgataccctagtagtccccagctcccaaacactgaaaggaaaacgtgaaaacactcaaggcctagggggaggacaggttggtaaaacatgaaaaggtaaataaaattacttgtttgaaaccactgagtcatggatcttttgattacacgctcataattgggccattaaactgggaacgaagagaaagatttttttgtttgtttgttttttgagacggagtttccctcttgtcaccgaggctggagtgcaggggacacgatctcggctcactgcaacctctgcctcccgggttaaagcgattctcctgcctcaccctccggagctgggattacatgcatgcgccaccacacccggctaatttttgtatttttagtagagacagggtttcgccatattggccaggctggtctcgaactcctgacctcaggtgatccgcccgcatcggaaaaggagttagggatgacttactttcccccagacccttttagtcccctcaacggctgtcatttctttaactcacagtcagggattgtgaccctccttggtaatcccatggttctcctaattatgtgttggctagtcactttccagccccggtaaccctcagggaccggccccaaggcaaggaaagtggcttcttcctgggggcgggagaagcaatcaacctcctgggaccacacagatccttggtttggattcagtgaaaggccccagccacccaactccaccttttctcaccacctcgtattcaataatcaactcctgctgagctcttctgaaatcactcaagtccatcaaggtatgtccattcctgctgcaaactccaccgtatctcatcgccacattgcagcccagagtattcctcctcaaaaaaagacatctgagggccgggcacggtggctcacgcctataatcccagcactttgggaggccgaggcaggtggatcacctgaagtcaggagttcgagaccagcctggccaacatggagaaaaccccgtctctactaaaaatacaaaattagccgggcatggtggcacatgcctgtaatcccagctacttgggaggctgaggcaggagaatcgtttgaacctgggaggcggaggttgcagtgagccgagatcgcgtcattgcactccagcctgggggacaagagtgaaactccatctcaaaaaaaaaaaaaaaagaaaagaaaagaaattaaccgggtgtggtggcatgggcctgtaatcccagctactcaggtggttgaggcaggagaatcatttgaacctgagaggtggaggtggcagccaagatcgcgccactgcactccagcctgggtgacagagtgagactctgtctcaaaaaaaaaaaaaaaagacatctgacctcatttctccctcgcttcagtcccttcagtgacttcccttagctcttaacagtgtgggctgcccttaatgacttcagtcactgagtatagatagggaaaaacagaggagaaacctggcagataccaccttaaccaagggattaaggtgaacaattaagtcctgttgatgttactcttttttttttttgagaaggagtcttgctcagtcgcccaggctggagtgcagtggtgcaatctcggctcactgcaacctccgcctcctgggttcacgcaattctcctgcctcagcctcccaagtagctgagactacaggcgcacgccaccacgcccagctaatttttgtatttttagtagagacagggtttcaccatgtcggccaggatggtctcaatctcttgacctcgtgatccgcctgcctcggcctcccaaagtgctgggattataggcgtgagccaccgcacccagccctgttgatgttactcttaagtctctttcattttgtaacatacctccttggcttttattttttatttcatgacactgatttgacaagacacagaatcatttgtcccgtaaaatgttcctcactcaggagctggctgattacttcctcagggtgttttttcatgtgttcatttatcttcttcagttcctgtcaaccagtagttagatcgagatgacaaggttctgctgatgtggtccctgccaacctctgcaggctgatctcatgccatttccttcccctgtcaactctgcagccagatgcttctaaataaagacgcgctctctcactgtggaacttcccatgtgttttttgttttgttttgtttttgagatggagtttcgctcttattgcccaggatggagtacagtggtacaatcttggctcactgcaacctccgcctcccgggttcaagtggttctcctgcctcagcctcccaagtagctaggactacaagcgcctgccaccacgtgcagctaatttttgtatttttggtagagacggggtttcaccatgttggccgggctggtctccaactcttgacctcaggtgatccacccacctcggcctcccaaactgctgggattacaggtgtgagccactgcacctggccagaacttcccatgttcttgctcaactaattcttagcctaggtggcagcctaaatgtcacttccttaggaaaggaagcatttcctgacccccagatgaggttagacacccctctccctattaagccctcatagcaccttgcatatgccctttgatgacctttatcacacaatttcttgtctaccctttcaacggtcaacccagaaggggtgggtgctacctctatcccccagggtctagcctggccgggcatatggcagcatacagtaggagctcgttaactgcttatcagattgctttccccccatactttcaaccctccctcctcatcttttctctcagcttcacctcctacagccagaaaggggaagcctgggtctctcgtggactgaggagaaatagaccttttcaccactccgttggccaaaaaataagcttttcctaactcctgacatctattacataacaataggaaaggatgtggttatctcccagtggtggggttactaaggatttgtttattcattttatttagctggactgctcatttttcttccatgaacacaagtgcttttgtaataaaaatgcttaatatacaaattgctctttaataattcacttaccaactattgattgaatacacaaggctttgtgccgaaccttagcgacgcaatggggaaaaaagacacataatggtctctgcctccataaagcttacagtttagggcagggatcagtaaactacggcttccagccaaatgtagcccaccttttgtttttgcatggctcgtaatctaataatcagatttcacagccgggctcatgcctgtaatcccatcacgcctgtaatcccagcactttgggcgccc[133 bp omitted]ggaggctgaggcgagagaatggcgtgaacccaggaggcagagcttgcggtgagccgagattgcgccactgcactccagcctgggtgacagagcgagactccgtctcaaaaaaaaaaaaaaagaagatttcacgagaaaattattcgaaattcaaattacagggtctataaatttatattgaagcagagccacaaccatttctttctgtattgtccgtggttactttctggatgcaaacggcagggtttgagtgccgcaattgcagcagaatccctatatgacctacaacgtctgaaatatttatgaacagatcctttgcagaaagtctgccagcccctagtccaggacaagatttccaaaatgcaggtttatacaattttgtgtggatcatgaagtcaatttagtgagcctcaagcagcatctttttttaatgaaatagaatagataaaaatatgtatcacatgtataattaataactattttgtgaaacatttgttatacatacgatatatgcttatatgtgtatgtgctgcatcctgatgtaaaatgtatttcttactgtggaccatgttcaaagcatctgaaaggctgggtgcagtggcctgtaaacccagcactttgggaggctgacgttgtaggatcacttgaggtcaggagttcaagaccagcctgggcaacatattgagacttcatctctactttttaaaaaaaaaaatctgaaggtgtctggcttagagggaagcctggaataaacagagaagtaagcagaaaataacagtacagtgtaattggtgcaatgatgagttacagacccttagggtatatcagaggcacttaagacagcctcagggctgtcagtgaaggctaccaggaggaaatgacacccaaacagtgacctga[136 bp omitted]tggtgaaaccctgtctctactaaaaatacaaaaattagccaggcgtggtagcaggtgcctgtaatcccagctacttgggaggctgaggcagagaattgcttgaacccaggaggcagaggttgcagtgagctgagatcacaccactgcactccagcctgggcaatagagcaagactccatctcaagaaaaaaaaaaaaaaaaagaagtgtggtgggatgggaagggcagcatggatctgtttgggatgctagtctcaacccagcctcatggactgacgtctgagccctgcaagaggaaccacaggcagaggctgaaggaagagtcactgtatagagcctctggaaggtcagcagggcacaaacaccacagcacagcacctaaatccccggaatcagtgtcacacggggggcagggatccccccatttctcaggggacacagtgtggttttgagaggcattgagaatcccaaggaacccaaaaatgtggctctgtatgacttcaatcgtttttcttttttcttttatttttttgagacagagtttcgctcttgtcgcccaggctggagtgcaatggtgcaatctcgtctcactgcaacctccgcctcccgggttcaagcgattcttctgcctcagcctacctagtagctgagattacaggcatgcatcaccacgcctggctaattttgtgtttttgtgggtttttttgttttgtttttgctttcttgggttttgttttgttttgttttgttttgtttttgtttttgtttttgttttgagactacaagcgcccgccaccgcacctggctaatttttttcttttcgtgcttttagtagagatggg[136 bp omitted]tcaccatgttgcccaggctagtctcgaactcccgtcctcaggggatccaccctccgtggcctcccaaagtgcttagattacaggcgtgagccacagcgcctggccaatttcaattttttaaaatgtattggggttggtttgatggcccgggatatatgcactatattggtatctgttgcatgagtacttgaatacgtattctcctgtcattgggtggaatgatctataagtattcactacatcctgtttgtttatgacattgttgagttcttctatctccttactggtttttgtctagttgttcaatcaattgctgacaggtgaaccatgaactatgaatttaaacaaacctggtttgaaactggactcatctggttactagctgggtggtcacgagcagatttagaattagactctggagaaactcttctgagatccaaactttactggtctgacatggaaattacaagtagcaaacgttcatatagcgcttactctgtgccagactgtgttctaatcacttggcatttatcagtctattcctcacacaacaaacttaagtcaggtgtttattaccccccattttacagatgagaaaactgaggcacagggaggtgaagataaagtaaccaagtaggctgtgaacaaacacaggcaatctgtctccagaatatgcacttttaaccccttcgccattccgcttctgggaaaatgaggcaatttcctgggatagttaagaaatgtttgctatggaagcccttccttcctagaagcctgtctctgtctcgctcttttttttttctttttttttttttcttttttgagacatactcttgctctgtcacacaggctggaatgcagtggtgggatctcagctcattgccacatccacctcccgggttcaagagattctcgtgcctcagcctcccaagtaactggggctacaggcacacaccaccacaccaggctaatttttgtatttttagtagagatggggtttcaccatgttgtccaggctggtctcgaactcctgacctcaggtgatctgcctgcttcagcctcccaaagtggaaggattacgggcgtgagccactgcgaccggcctctctctgtctctttgaaacagggtctcactctgttgcccaggctgcagtgcagtgatgcagtcttggctcactgccaccccaacctcccggactcaggtaattctcctccttagcctcccaagtaactgggactacaggtgcgcaccaccacacccagctaattttttgtatttttagtagagacagggttttgctatgttgctcaggctggtctcaaactcctggcctcaagcaatcctcctgcctcagcctcccaatgtgctgggattataggcaccagctgcctcgcccagctggagccagtctctcttataccaggcattgatgattggccatgcaaagaatcagaaacactctgtcaagttttctttgaaatacatgaaggaacttaagggagacccacagggctccaagagcttcaggtaagatcactactgcccacttcaccactataatgggagatggaatagaacatgataaagtttgccgggcacagtggcttacgcctgtaatcccagcactttgggaggccaaggtgggtggattgcctgaggtcaggagttcgagaccagcgtgaccaatatggtgaaaccctgtctctactaaaaatacaaaaattagctggacatggtggtgcatgcctgtaatcccagctactcaggaggctgatgaggcaggagaatcacttgaacctgggaggcggaggtttcagtgagccgagattgtgccactgcactccagcctgggagacagagtgagactccgtctcaaaaaaaaaaaaagataaagtttgaggcttaggggtccacatcacctgagtttaaatcaaggctcccaagttaacttcacacactggataagtgactcaagctctccgtgtctgtctcctcacctgtaaaatggggtattaactgtacttattccacagaacttgtgagaccaaaggcaattaataaattaataaatgcaaataaataatttgcatttaaattatgcaaataaataattaataattaataaatgcaaattcttagaagagttctcagcatgataagtatttaataaatggtataagttgttgtgttattactattgcaaaataagaggtcaaccctaagccatggactgcaactacaactacttcccaccttctgcaaaaagaacatcatgctttacctccctgttagttgtgggcaccccagaagtccacagtggccagggcaggcatcttcacccagacttaccccaaaggactccgttcatctccatttgggttcactctcctttctcctctccaccctgccccaaatcctttcattgcacccttggaaacctaaagtatgttcgcaaaacaaaatccccaaatcatcaagctcttctctcagttttgtttgccttcttgctctcataggaacctggctcttcccgcaaagacattgctcccttgcaacgctccaaggaggcagctatttcctttttctcccaccctccacatacctgcagtgaggcagctgtcccttccaaaacatttctcctctctccaaaacaaaacaaaggcatctgttgttttaaatttttttatttttaatttttctgggttcatagtaggtatatatatttatggggtacaagagatgttttggtacaagaatgtaatgtgtaataatcacatcataaaagcatttatcccccttaagcatttatcctttgtgttacaaacaatccaattatacttttagttatttttaaatatacaattaaattattattgactgtagtcactctgttgtgctatcaaatactagacattattcaaactattttttgtacccattaaccatccctaccgcccccacaacccccctctcctccctgcccctaccccacacacacactacccttcccagcctctggtaaccacccttctactccctatctccgtgggttcaattgttttgatttttagaccccacaaataagtgagaacatgtgatgtttgtctttctttttttctttttaattttaatttttttttagagggagtctcactctgttgcccaggccggagtgcagtggcgtgatttcggctcactgcaacctccccctcctgggttcaagcaattctccttcctcagcctcttgagtagctgagattacaggtgcctgccaccacacccagctaatttttgtattttagtagagacgggttttcaccatgctggtcaggctggtctcaaactcctgacctcaaatgatccaactgcctcaacctgccaaagtgctgggattacaggcgtgagcaaccacaccagtgtgatatttgtcttcctgtgccaaagcgtctttaaagcacatgccaacacactgtagcatccgttacccctccttgttgcaatcatcttccaacatctaccagcttcatcaaaggcttaagcatttgccttaaatttacgtctccaccattaatcacgtctccatttgtgtggactcagacatccacctaggcaatccaaccatccccgccaccccgcttcagttccttgtcctctgcacttcggtacaattttttcctccaccccacctcagccacgcactcccacagcaaaccgtagactctgtgatgatcagtaactgccccatttcaacctcctgaggacaggcatcccgccactatccaccttttcatccccttctctggtaccctcacaccaacaatccttcacccctcaggctctgtagtccatgtaccattccacatttccactgtctgtcaccttcctcctgtcgtcacatctccccttactcagtttttttgtttgttttgtttctttgagacaaggtcgagcagctgagactataggcacacgccactgcgcctggctaatttttgtatttttagtagagacgaggtttcaccatgttgtccaggctggtcttaaactcctgagctaaggtgatccacccgccttggcctcccaaagtgctgggattccaggcgtgagccaccacgcctggctggtttacttgtctattgcctacctctcccacctgaatccccagtatgtggaacaatgcccggtatcaagtgagtactccatatacatctttctggtgtgaaagaaagaaaaggagagagggaagagagaaagaagtaacaaacaagtaagcaaaaagcctcagaaaaatggttttgatggccggatgaggtggctcacacctgtaatcctagcactttgggaggcagaggcaggcggatcccctgaggtcaggagttcgagaccagcctgaccaacatggagaaaccctgtctccactaaaaatataaaattaggtaggcatggtggtgcatgcctgtaatcccagctactcaggagactgaggcaggagaatcgcttgaatccctgaggcagaggctgcagtgagccgagatcgcaccattgcactctagcttgggcaacaagagagaaactccgtctcaaaaaaaaaaaaaaaaaaaggttttggttaaagccatcttaaatcattagctcttcctgtctgcatgtttcaacaaccacgttgatcgagtagcatcgcagttacaagcacagaactaagcagaggcctcctaagtgtaagccccagcttgactaacttctgctgtgtagtcttaggcaagtcactttatttaaaaaaaaaaaaaaaaaaaggtcgggtgtggtggcctttttttgtctcttaaaaaaaaaaaaatacagaggtctccctatgttgcccaggctggtcttgaactccttagctcaagggatcctccccgtctgtgcttcccaaagtgctgggattacaggtgcgagccaccacacctggccaggcaacttactttcactcggagctacatccactcattcagcaaatacttactgagtgcctactcagctgcagggtgctaccctaggttagttgtgaggattatatacaacaaagtatgagaagcccctaacaccaagcttagttcattatcaaataataacatggctgggcgcagtggctcatgcctgtaaacccagcatgttgggaggctgtggcaggaggattgcttgaggccaggagttcaagaccagtctgggcaacatagcgagatgctgtctcttaaaaaacaacaacagcaacacactcctaaaaatctgttattatttgtgccccatagtgtgaccttggctcactgcagcctcaacctcctaggctcaagcaatactcctgcctcagccttccgagtagctgggactacaggtgtgtgtcaccatgccaggctaatttaagtaaaaattttttggagagacagggatctcactgcgttgcccaagctggtcttgaactcctggcctcaagcaacccttctgccttggcctcccaaaattctgggattacaggcatcagctaccaagcctcatctcattgtctgtttataatcatctgtacttgcaatttgaatattctcactgattagaactattttgggattttttaagaggtcgctgttacttaaacatttagaaatttctggtttattgcattatggtctgggtatcagtccagtacaatttcaagtttggggaatttcatatctccttcacggcctaatatttgaccaagatttgtaaatgttttattggcattgaaaaaggtaggttctccatttatgagatacaaagtcaagtaaatagcacttgaatacatgctccaggaggatggaggctcaggatgttcaccgatgatgtatttatggctgatatcttcctggtatccagcaaagggcctggcacatatcatttagtaaatatttgttgaatgagaggctaactaatcaatcaactttatcattgagattctctgtttctttatacgtttgtatatttttcttactttgtcgaagagaattatattacagtttcccactactattatatttctgacagtctccctcggcatttctaactatttggggttttttttcttttctttttttttttttttttttttgagactgagtgccctttctcataaaacaccaaccacttcctctatggaaataaatttattcccagtaccttcttgggtcttgcaaatattacagccaaatgcatttttttttttctggcatgtcagtgtctgctcactgtagaggagggtgaacaagttctggtctcctgatctccaggagtctgagctaggagaaggaagaagagagaaatgtcaaagggctatatttgcagggtttctatggaaaaatctgatttcaaacaatcttcatcatctgagatggtttcccttctaatgactccatctggtcctcacgtcgatcttagttctcaggagctgataactctggccttgccttgctcagagagcattcaacccccactcctccccaggtcacattgccaaacaccttcagtggcaattcatgggtcctcagaaaagcatcactctcattcctggtctccctccctccactgctctcctctacaatcccacctcaggtgatcctcccgcctcggcctcccaaagtgctggcattataggcatgagccaccgtgcctagcccggaatctgcttttaacaccatcttcaggaaatctgtatgaagttacggtttgagaagtactgaactaagcagacagccaagtaagagcccctcctgtccaggtctaagggtagttccgattccctgaccagcaaatcttgagtagctgcctcccagtagctgcctcccagtcactctctaccacaccaccctatttccttcatgtaatttagcataacctctaatttctagtttactgcctgtctccccaaactataatataaactacgaagaggtacctcatctgtcaagtttagtgctgtatccactgggtccacaactaggcacattacacagagggtactcgatcctgcatttcactgacttaaatactttcaagtgttatacatcatgcttttgtttgtttgtttgtttgtttattttgagacagagtctggctctgtcgcccaggctggagtgcagtggcatcatcttggctcactacagcctctgtctcctaggttcaagcgatcctcctgcctcagtctcctgagtggctgggactataggcgtgcaccaccatgcccggctaatttttgtatttttaggagagatgacatttcaccatgttggtccggctggtctcaaactcctgacctcaagtgatccatctgcctcggcctcccaaagtgctgggattgcaggtgtgagccacagcacccggccaaaccatgatacaatgctttcttaacacttcaatttttattttatgctaattgaagtctctttcagaccattaaaaaatctaattctggtgcgtacacaaaaacaaaaataatatggttaaaatattccaaaaaaatctttaaagtctgactcttctgaatcactttctatcagtgcctgtgttgctgtcccctctactgtcgagggcattggagaagcggaatttctttaaaaagtgctccactactgtctccgagattttcttctaagctagtgacacattcttgttttaccaaatagtgtcaacaaaattgatgtcttcactaacaaattttcgctccactactttatttctatgcttaatacatcatttccttttgatttctgttttaaagcatgttatctttttgaagattttttttcttaatagcatttatttatttatttatttatttatttatttagagacacgcttgctgtcaccgaggctggagtgcagtggtgttatctcggctcactgcaacctccgcctcctgggttcaagcaattctcctgcctcaacctccggagtaactgggattacaggtgtacgtcaccatgcctggctaatttttgtatttgtagtagagatgaggtttcgccatgttgtgcagcctggtctcaaactcctgacctcaagtgatctgcccgccccggcctcccaaagtgctgggattacaggcatgagccaccgcacccggctgaatagcctttattttttaaaagcagttttaggttcacagcaaaattgagcagaaagtacagagttttcttttcttcttcttctttttttttttttttttttttttttgtagttttagtagagatggggtttcaccatgttgcccaggctggccttgaactcctgacctgaagtgatccgcccgcctcggcctctcaaagtgctgggattacaggcatgagccactgtgcctagccgaaagtatagtgttttcttatactcctacccccacacatgcacagcctcccccactatcaacatccggcaccagagtgatagatttgttccaatcagtgaactacattgacacgtcattatcagccaaagtccatcgcatagtgtacattaggattcgctcttggtgttgcacgttccatgggtttagacaaatatataatgacgcaccagtatatatatagtatcatacaaagaagtttcactgccctaaaatcctctgtgctctgtttattcctccttcccctccctaccaacccctggctgccactgaccttttcactgtcttcagagttctgtttttttccagaaagtcatatacttgtagccttttacttttttttttttttctcccttaagatggagtttctttcgctcttgttgcccaggctggagtgcaatggcaagatcttggctcaccacaacctccgcctcccaggttcaagtgattctcctgccccagcctcccaagtatctgggattacaggcatgcaccaccatgcccagctaattttgtatttttagtagagtctgggtttctcc[137 bp omitted]ttaatagagacagggtttcaccatgttgtccaggctagtgttgaactcttgggctcaagggatctacccacctcagcctcctaaagtgctgggattacaggtgtgagccaccacacctggccttttgtttgtttttgttagagacagggtcttgctctgtcacccaggttggagtgcagtggcacaatcacagctcactgtaacttgcaactcctgccctcaagcaatcctcccgcttcaccctcccaaagcactaggattacaggcatgagccaccatgcccagccctactggagctttgtagtaagtcttgatgctgggtcgtgtcaatcttccaactttgctctctttcaatattgtgttggctattctgggtctttcgcccctccagacaaactttagaatcagtttgtaaatatccatgaaatggttttctggcattttgattgggattgtgttgaagatacagatcaatttggaaagaactgacatcttgacaatgttgagtgttcctatatatgaacatggactctctccatttatttatatcttcttcgatgtctttcatcagagttttgtagttttcttcatgtagatcttatacgtattttgttagatttatatgtaagtatttaatttgggacagtgctaatgtaattggtactgtgtgttatttgaagacattataaacagcaattcaactcaagaagtgtagtaccagtagggttcacaactcagctgaggtgataacaatacgaacagctacgactgggttctcacaagtgtaggcaaaacctaccatgttgtatgacaccatggattgtacaatatatcctaattttgggaaaaataaaat[135 bp omitted]accccatctctactaaaaatacaaaaaattagccaggcgtggtgacacatggctgtagtcccaactactcaggaggctgaggttttagtgagccaagatcacaccactgctgtactatagcctgcgtgacagagtaagattctgtatcaaaaaaaaaatttgaaatatgctaaatatttaacaaataggccaagcaggtggctcacacctgtaatcacaacactttgggagaccgaggtgggtgtatcacctgaggtcaggagttcgagaccagcctgaccaacacgatgaaaccccatctctactaaaaatacaaaaaattagctgggcttggtgatgcgcgcctgtaatcccagctacttgggaggctgaggcaggagaatcacttgaattcgggaggtggaggttgcagtgagcccagattgcaccactgcactccagcctgggagtgagactctgtctcaaaaaaaaaaaaagaaaagaaaagaaataaacgtcactgactcaatttcacagtattctcataaccaatttaaagtctagaaaccactggaaaattttccatttttcccagtttatatcctaggagaaagcaaatctaattggcctggacactcagcttatggtacagtttacaaatttctggtaacttccactgctttaaacgaagactgaaattaccaatgtctcaaatagagtagaagtttatttcttgctcacaaaatagtaacgaggctgccgggcccggtgcttcacgcctgtaatcccagcactttttgggaggccgaggggagtgggtcatttgaggtcaggagttcgagaccagcctggccaacatggtgaaaccccgtctctactaaaaatacacaaattagccaggtgtggtggtgcccacctgcaatcccagctagttgggaggctgaggcaggagaattgcttgaacccaggaggcagagattgcagtgagccaaggtcgcaccactgcactccagcctgggcaacagagcgagactccgtctcacaaaataaataaataaataaatagtaaggaggcaggtggcccacagcggcactcctgctcttctaggttgttcgggagcccagaatcctgatattgttgttccaccatctctaagggttgtcctcaccaaagagtccaaacggttcaactcctggcctacattccagccagcaggatgaggaaagggaagctcattccttaaagtctaccaccaaagttgattgttgcagccattaaaaaagaacaaattcatgtcctttgcagcaatatggatacagctggaggccattattctaagccaattaacacacgaactgaaaaccaaatattgcatgttctcacttacaagtgggagctaagcactgggtgcacatggacataaggatgtaaacaattgacactggggcctccagaggggaagggagagagtggggaaagggttgaaaaaactactgggttctggccgggtgcggtggctcatgcctgtaatcccagcactttgggaggctgaggcgggtggatcacctgaggtcaggagtttgagaccagcctagtcaacatggtgaaacgccatctctactaaaaataccaaaattagtcagatgtggtggcatgcgcctgtaatctcagctacttgggaggctgaggcaggagaatcgcttgaacccaggaggccgaggttgcagtgagccgagatcgtgccactgcactccagcctgggtgacaaagtgagacgctgtctcaaaaaaacaaaaaaccaaaaaaactactgggtcctatgctcagtacctgggtgacaggattaatcatgttcctaaacctcaacatcacacaatatacccttatgacaaacctgcacatgtacccccaaatctaaaataaaagctgaaattataaataaattgaatactttgttgtggggatctcataaaacttacagaaaacatctgcattatgccttaaaaccaacattgcagtaaggtaagatcaactagcagcattctcacaaaaaggaaacaaagttgatcaaatcatttacactccttcccataagccataactatgtgacaacgcatggccacagctacaaaagaagttagaaaaaatagggtttttttgttgttgttgttgttttgacacggggtctcgctctgtcgcccaggctagagtgcatgcagtggcatgatctcagctcattgcaacctccgcctcccaggttcaagcgattctcctgcctcagcctccggagtagctgggattacaggcatgtgccactacgcccggctaattttgtatttttatagagatggggtttctccatattggtcaggctggcctcaaactcccaacctcaggtgatccacctgccttggcctcccaaagtgctgggattacagacgtgagacaccacgcctggctaatttttgtatttttagtagagatgaggtttcaccatgttggccaggctggtctcaaactcctgacctcaggtgatccacccgcctcagcctcccgaagtgctgggattacaggcgtgagccaccgggcttggccgaaaatatagtctctagcttagcagccatgtgcctttagcagcagactacaaagtctgctactataataaaagcagaagactgggactaactcactatctctgtcacatactaggtcaagcatgtgctactcagctatgggcagtgagtacggagccacagagtttagacagattccctggagaggatattcgctggatgcctccccatcattcattctgtctttcctccttcctaatactgcccttaatttcccagcctggtggcttagacagaattgacaacaccccctgtgctggaatgcctccatgtgaagaaggacatgtttgcttccccttccgccatgattgtaagtttcctaaggcctccccagccatgctaaactgtgagtcaattaaacctctttcctctataaagtaccagtctcgggtatgtctttattagcagcgtgagaacagactcatacagcatgttctaccctctggccacagtgatccgtgtaagggacagacatagaacccagtctgcaccaaggagaaattttctggggtaaatgggaaagaaacttcctctctactcagggaaagctatgcgaggagattctcttcctcctggtggtagggtgtaaagacataaggtctgaactgctgcagctaatactactgtcaggaggaagatcccacttaaggaggaagtcaaagccaaaaaaaggaacagcagagagaatggcagagaaacaagaacactgatgacatcctgaacttctggaccaaactgcacctgcagttagtcctacttcagtcctactggatgttttgattgcttgaaccaataaattccctttttgttgcaatagagttgggttttctgttacctggtatagttccttacaatggacccagagtatggcaagcaataatgacatatttaatag[133 bp omitted]atctccacctcccaggttcaagcgattctcctgcctcagccttcccaagtagctgggattacaggcatgcgctaccaagtccagctaattttgtatttttagtagagatggggtttct[142 bp omitted]acgcctgtaatcccaacactttgggaagcctatgtgtgcagatttcttgagcccaggagttcaagaccacttgggcaacaaaatgaaaccccatttctacaaaaaatacaaaatgatggctgggctcggtggctcacacttgtaatcccagcactttcggaggccgaagtgggcggatcacctgaggtcgggagtttgagaccagcctgaccaacatggagaaaccctgtctctactaaaaatacaaaattagccgggcgtggtggcacatgcctgtaatcctagctactagggaggctgaggcaggagaatcgcttgaacctgggaggcagaagttgcagtaagctgagattgcgccattgcactccagcctgggcaacaagagtgaaactctgtctcaaaaaaaatatatatatatatatttacatatatacacacaaaaagattagacaagcatggtgggtggtgaacatctgtagtcccagttacttggcaggctgaggcaggacgatcacttgagcccaggagatagagtttgcagtgagccaagatcatgccactgcacaccagtctggacaacagagtgagacactgtctttaaaaaaaaatgagactgggcacaatggctctggccgggttgtggtggctcatacctgtaatcccagcactttgggaggccaagacaggtggatcacttgaggtcaggagttcaagaccaccctccaacatggtgaaacttagtctctactaaaaatataaaaattagccaggcctggtggcccatgcttgtaatcccagctacttggggggctaaggcaggagaatcgcttgaactcagaaggctgaggttgcagagtcaagatgacgccactgcactccagcctgcatgacagagcaagactctgactcaaaacaaaagagaagaaaaatatttttttccaaaatgtgcatccagttttgtaaccagatatatgaaatttatttagacttacgtcaagacttccccattttggggtttttattttacttcatctcttggtgagtcaacacaatttctctaaaaaaaaggagccaaagtgttattttgaaatccaaacattctcagaaatgcaattgtgttgcccttaacatacaaaatgcaacttagacatgtatatgatagttctaccttttttggtggacacagctgccttactcctttgtcctctgacattcagtatttcagagaagactctggccacaccaactattgtttctttctaagtagcctttttaaattctgcctagatgtatcctttaattcagatattttgtcaggatgaatctatggtcagctgacttttaatattttacctgccgtgcagtataactttcaacccactgacctgagtggatctatctgcgctcagtgacgtcttctcctagtgcagatgttttaactgtggtgtcacttccaccagttctattcttgttcttaggagaagccagtttcctgaatttttttttttttttttttgagccagagtctcactctgtcacccaggctgaagcgcaatggcgtgatcttggctcactgcaatctccacctcccgggttcaagcgattctcctgcctaaacctcctgagtagcggggattacaggcacccgccaccatgcccagctaatttttgtatttttagtagagacggggt[133 bp omitted]gagtcttgctctgttgcccatactggggtgcaatggtgcgatctcggctcactgcaacccccacctcccgggttcaagcgattctcctgcctcagcctcctgagtagctgggattacaggtgcctgccatcacacttgtctaatttttgtattttttgtgaagatggggtttcgccat[140 bp omitted]aattctagtgatgtcatcaaaaatcttcctggaaatctcttccaaatcctatagtaaatgttcctccagaggattctgtttctttcagtcttcaggttgatttgcccttccctggttttgagaaaatttttcagaatccctataatgttttgttaacattattaacattatttcattcatccagaattgtataaaaataatgtaatgaatgcctgtggaccaccccacccacacaactattttttttctctttattcatcctcaaaacagacaccatttggctggccgcagtggctcacacctgtaatcccagcattttgggagaccgaggtgggtggatcacctgagatcaggagttcgagagcagcctggccaacatggagaaaccctgtcttcatctccacaaaaaatacaaaaatgagccaagcgtggtggcgggcacctgtaatcccaactacttgagtctcctgaacccgggaggcggaggtggcggtgagccgagatcacgccactgcactgcagcctgggcaataagagtgaaactctgtttaaaaaaaaataaaaaagaggcaccatctctcagaatcagcttgagcaacttgtagacaaataggtggccagctcttggccctgctctctgtccatcagatcaatggctgaatcccctcttcaggtccacggttggaagggccactattcgggatatgacagttgctctggtagttcaacattagtgctggtgacaacctctcatcggccacctcctgaggaaccagagttttccagtgcctgtgcttctccctctggcgctgtttcagagtaactattctccatacacttctcttgctgtgacttctgcttatttctggtgtcagttgcctctggcttttgattgcttctttcttgcatacaactctcagtttgaagccaccccactctctgatgactgtctcagcttgtctcacagacacatttcccaatcatgaagatccagtcggtggattggtcattatccagtcagtgtacctctgttggatggagttctcacctcgagagacctcacaggtcgctggctacatgtctgcctttgggtcagctacttgttcctcaatcaaccagccctggcctagataagggggtctgtgttaggaacttgttactgggcaacaaaccatccccctcgacgaagtcttagtgtcaaataaatataagcatttatttcactgatacacacataggagttggctgggggtcaggtgatctagggtgggatccaatgtgacccttttccttgtatcttttttttttttttctagatggagtcttcctctgtcacccaggctggagtccagtggtgcaatctcggctcactgcaacctccatctcccgggttcaagcaattctcctgcctcagcctcccgactagctgggattacaggtgcctgccaccacacccagctaattttttttgtatttttagtagagacagggtttcaccac[132 bp omitted]tgggcctgtaatcctggctactaaggaagctgaagtgggaagacagcttgagctaggaggtcatagctgcagcgagccatgattatcttaccatggcactctagtctgagtgacagagaccctgtctcaaaaaaaaaaaaaaaaggataatgtaaaatctttaaagaaaagggacagaggctgggcgcagtggttcatgcctgtaatcccagcgttttcggaggccgaggcggggatcatctgaggtcgggagttcgagactagcctggccaacatggagaaaccccgtctctactaaaaatacaaaattagctgggcgtggtgtcgcatgcctataatcccagctactcgggaggctgaggcaggagaattgcttgaacttgggaggtggaggttgcagtgagccatgatcgcaccactgcactccagcctgggcaacaagagcaaaactctgtctcaaaaaacaaaaaagaagaggaacagaaaacatcagaagcaatatggaaatgttgtttaaagcattaaacatgccaacagaagcaaaaccaaatgtatcagtcatcataattacctatgagtcagagacaaatagttggggaggttcaaagtattttctttttcaggcatcctctgattcaagaggtaaattctccatgtatttttctcaatccagttcctctgtcttataaatagcagagattctggcttttctccattttccacatttctgtagtggtctgagtgggccgcaaggaggggctgcatcaggggccactggctggtgacactttccaggtgacagcctcattgcataccctctgaagccctgcagcccttcctgctaccctcatctcttcatggcactcccacatcctacttgagctagggctcattctgtgggggccttcactctcctgtttgcttctgagacccaggaggcagaggttgcagtgagccgagatcacaccactaaactccagcctgggtgacagagcaagactccatctcaaaaaaaaaacaacaaaaaaccattagccaggtgtggtggcacacacctatagtcctagctactcgggaggctgaggtgggaggatcacttgagcccaggtggtcagggctgcagggagccatgatccactccacaccagcctgggcaacaaagggagaccctggtctcaaaaacatttttttaattaaaaaaaaaagaagtcgactgggtggcttggctcatgcttgtaatcccagcactttgggaggctg[134 bp omitted]gaggcaggagaatcgcttgaacccaggaggcggaggttgcagtgagccaagatcacgccactgctctccagcctgggcggcagagtgagactccgtctcaaaaaaaaaagaagttatcaaggaaactgcagcaccccaacaaaaacagaacttctttgacctcagaatggaaaaatggcagaagctgattctcacagagttggctcagatcgcatggctgttgctaaatcaaacaccgaggctagcaggatagaacgctctcatcaatgaggcctaggtcccgagcccaccctgagagacaggcagtggcctcaagaggaggagacatcaataatcaaataccaggaagacgaaatgcaaggacaataagagcccacaatcacctctttaatttctccctgggaagaatgctgcctgagaggctggcagaaacgaagaggccaccacacatctgctctgtgcttcctagtttacaaaatacttctcaggttgtcccatttaatcctcacaagtagcccacaaggcaagtggcatcacttatttatttatctatttatttatttatttatttatttactttttgagacagagtttcattcttgtcactttatttacttatttatttatttttcgagacagagtttcactcttgtcacccaggctggagtgcaatggcacaatctcagctcactgcaacctccaccttccaggttcaagtgatcctcctgcttcagcctctcgaatagctgggattacaggtgcccgccaccatgcacagataacttttgcatttttagtagtgacggggtttca[131 bp omitted]gaaggggcttggctaagttgcaaagcaggtatggaaccaacagaggggctgtggagctgtgcagaaaaaacaggaaggcactaacccagggtaatgtgtccatagcccccaccttgtccagcaccacatcctcccttcacctcagggctgcagctcctccgcctctgcctcctcagggcccacatcctgtgcctctctcccttatcattctgatcctgccagtttctgccacgcctctgtctgaactttgctccgtgctccaggcttgttttcctctggacctgggaaccactggcttactttcactcaccgcctgtccttcctgacacctcaccatgtgtacgggaaaatgtgcccgctgtgtggggctctccctcattaccctctgcctcgtctgcattgtggccaacgccctcctgctggtacctaatggggagacctcctggaccaacaccaaccatctcagcttgcaagtctggctcatgggcggcttcattggcgggggcctaatggtgagaaggctggcaggggagcccgggccagctggctgggtgccacctaaggggttctgaacaggagggagagggagagaggaataagaatggttgcttgggagaggatggcaatggcttcgtgggggctagcagccctctggagtcagtcctggaggagccccagggtcccaagctgaatgtctgtggggcacagaaaggacgagagcctcactgctctaaagagctcccctaccgggtagggagcatgtcctgcctgtcctccctgtccccactgttgagcagatgctgggaaaacctcactacaatggtcgaggcagaaggagcagctggttgtcagagacgtcatcggggcaggataataacaggcatgagggtggggcgcagtgaaattacccagagccagggactgccctcacggatcagtcaccctcgcttgcctccacgtccattcactctcaccccacatttctggaagcccaatctgtgcggactgctaaggataaactcagaacttaggtcagtatggcagggaggatgccctcaagtcgtcttccgggagatgagaatctatttgccaggggcggaggtgggggttggtttttgtgtttgttttttgtttttttttttttttgagacagggtctctctctgttgcccaggctggagtgtggtggtgcgaacatggctcactgtagccccaacctcctgggcccaagcagtcctcccacctcagcctccgagcagctggaaccacaggtgggcatcaccacacccagc[139 bp omitted]cctcagcctcctgagtagctgggattacggtcacgtgccaccacacccagctaatttttgcattttcagtagagacagggtttcgccacgttggctaggctggtctcgaactcctgacctcaggtgatccgcccccctcggcctcccaaagtgctgggattacagatgtgagccaccgccccagcttacattttttgtagagacggagtatctctgtgttgcccagactggtctcaaactcctggattcaagtgatcctcctgcctcagcctcccaaagtgctagaattatagatgtgagccaccacgcctggccaagactaggatctgtcagaagtggaggaaaaggagacacagatttccccaatttactaacccccatcttccaactctccacccattcagggaaactttgggatggtcaacctcgtttaatatcttcatgcgataaagacaaaagatctacccagcacagttccccacttctcaggacagttggctaatgacattctccaggggagagctccccttggtcccttttgctggtcacacctcgctggtcacacctctatttgctaaaagaggatacctctcctttaaccaacaatcccctcttactctctagtatcttttcttctactccctcctcctgcatggattcttggctgctgtactctactctatcgctctaaactcaactctctttgagagtcacactcctctcaggctgacacacttagccattgtcacggggtgctccctctgcaacctgaaccacccctgtctccccacactcctctgccccatctaaccagcttgcttcagcggagctccctgagtctgccttccccaaatatgcattcacagctgccttccctccacctctgtgcccagagtcactctcaagaagcaccacccggtgggcatggtggcttacgcctgtaatcccaacactttgggaggccgaggcgggccaatcacctgaggtcaggagttcaagaccagcctggccaacatggtgaaaccccgtctctacttaaagaaatatacaaaaattagccaggcatagtggcgggcgcctgtaatcccagctactcgggagactgaggcaggagaacccgggaggcagaggttgcagtgaggcgagattgcgccattgtgctccagcctgggcgacagagcaagactccatctcatacataaataaacaaataaataagcactgctgtatatcacagggacacagacaggttcctgctctccctgaagcttgtgttccctttggtaaggccaccagtctcacggaagcaaggctggaagtcccacgagagcaagcactgcctgctttgttggccactatgtacccagtgctagaccagcaccttgcactaaacagacacccaattaatagtcatggaatggcagcgtgtgcctgtagtcctagtttgggcccagaaatgaaagattgcagtgagctatgaccacgcgccactgcactccagcctgggcaacagagcaagaccttgtctcaagaaaataaaaaataaaaaagtcattgaatgaagtatagaactaggcaaggcaatttcagatagaagtaggtaccatcggccgggcgcagtggctcatgcctgtaatcccagcactttgggaggctgaggcaggcggatcaccgaggtcaggagttcacgaccagcctgaccaacatgcagaaatcctgtctctactaaaaatacaaaaattagccaggcgtggtggcgcatgcctgtagtcccagctactcaggaagctgaggcaggagaattgcttgaacccgagaggcggaggttgcagtgaaccaagattgcaccattgtactccagcctgggcaacaagagtgaaactctgtctcaaaagtaaaaaataaaaataaaatgaaatggtgctggcatgaagagctcctaggcaaagcagatgccactttttataggattttcagggacaggctctatgaggtgatgtctgaactgagacccaaatgacaagaagaaggtgtgagtgttgcagacactaggggctggtagtacaaagcctaaggtgggaacaagctctacacttctgaggatcagacaggtggccggtgaggtgagatgtaatgagatgaggtctgaggagggcagaggctaggcctggaacaccctgaaaagccacagtggagtcatttgaatttttattattataagtacaacagaaaactattgaaggacttttttttttttttgagacggaatctcactgtgtcgcccgggctgcagtgcagtggtgcgatctcggttcactacaagctccacctcttgggttcacgccattctcctgcctcagcctcccgagtagctgggactacaggcgcccgccaccacgcacagcaaattttttttttttgtatttttagtagagatggggtttcaccgtgttagccaggatggtctcgatctcctgaccttgtgatccacccgcctcggcctcctaaagtgctgggattacaggagtgagccaccgcgccatgccctattgaaggacttttggcactttgttttttgacggtttaaaactttttatttaagtcacacagacaagtacccagatccttagtacacagctcaacaaacttttacaaagtgagcacatctgagcccaggtcaagaaacagatcattaccagaagcccagacatgcttctcaccacacacggaaccccagaatcacttcaccaacaagcgtaaccactattctgtcttctaaccccatagacgagtttggcttattttgcactttacacaaatggaatgatagagtatgtgtctggcttttttttgagacggagctgttgcccaggctggagtgcagtggcgctatctcagctcactgcaacctccgcctcccaggttcaaatgattctcatgcctcagcctccagagtagctggggttacaggcatgagccaccacgcctggctaatttttgtatttactttagtagagatgggggtttcgccatgttggtcaggctggtctcgcactcccgacctcaggtgatccacccacctcggcctccccaagtgctgggattacgagcgtgagccaccgcgcctggcctgtgtctggcttctttagctccatattacgtttgtgagagccacccatattatcaggtgtagctgtagttttctttttttcttatacattctattatgtgactatacctcatttatacattctactgtttgtttgtttgtttttttgcttttttgcttttttgttttttttgaaacagagtctcgctctgtcacccaggctggagtacaatggcgccatctcggctcactgcaacctctgactcccaggttcacatgattctcctgcctcagcctcctgagtagctgggattacaggcatgtgccaccgtgcccagttaatttttgtatttttagtagagacggggtttcgcgatattggtcaggctggttttgaactcccaaccttaggtgatccgcctgcctcggcctcccagagtactgggattacaggcataagccactgtgcccggcccattctactgttgaaggagatctggatcattcccagtttggtttttttgcaaataatgctgctataaatattcttgtagatgtatttaggtacaaatacgtgtgcatttctattggataaaaacctagcagtaaaactgctgattcttaagacatgcaagtattcagcgctaatagatattgccagttttctgtagttcttagtgtgagaggtctggttgctccacacgccactggaatgaagaagactcctttgaccactgtgtggagaatgggtagtagaaggtctgcaatatatacagaaaaagaccaaactgagctgggcgtggggcctcaagcctgtaatcccagcacttttggaggccgaggccagcggatcatgaggtcaggagttcgagaccagcctgaccaacatggcgaaaccccgtctctactaaaaatacaaagttagcagggcatggtggtgcatgcctgtaatcccagctactcggaaggctgaggcaggagaatctcctgaacccagcagacagaggttacagtgagccgagatcatgccactgcaatccagcctgggtgacagagcaagactccatctcaaaaaaaaaaaaaaagaaaaagaaaagaccaaactgaggtcacggaagacatccaggagagatgagagtggcttggactaggccagtggctatggaaatggagaaatatgagctgattcaggctataagcacagtgttttcttcttcatttatgatgacacttttcactaagacaaaaagatggtgaagaatgagacagagaagcacatactacaaagggaagcaaacactttaatcaaaagagtaaaaatctcaaatagggccaggtgtggtggctcatgcctgtaaaatcccaacactttgggaggtggaggcaggagaatcgcttgagtcccagcattcaagaccagcctgggcaacatagtgagactctatctcaacaaaaattttaaaattagctgggtctggccaggtgcggtggctcacacctgtaatcccagcactttgggaggccgaagcaggctgatcagctgaggtcaggagtttgagaccagcctgaccaacatggagaaactttgtctctactaaaaatacaaagttagcagggcgtggtggcgcatgcatgtaatcccagctactcgggaggctgaggcaggagaatcacctgaacacgggaggcagaggttacagcgagccaagatcgcgccattgcactccagcctgggcaacaagagcaaaacttcgtctcaaaaaagaaaaaattagctgagtgtggtggtacaagcctgtaatcccagctactctaatgctaaggtgagaggatcacttgagcccaggaggtcgaggctgcagtgagccatgatcatgccactgcactccagtctgggcaacagtgtgagaccctctctcaaacaaaagcagaaacctcagacaagtagatcattcaaaattggtaaatccaaaaggcaattctaggtgtgtttggatccacaagcctccagtaagtgacctaaccagggaggtaaagtaaggtgtcagcatgggtcctggccctgccatgagacaggaagaagagagagcaggtgtttctctgaggttgctggggatgatataatagaactgaaactctcagccctttccctggagaagcacaaaatgctgccttggatggtatgtgccagataagacacatgaggagccaggcacagtggctcatgcctgtaatcccagcaatttgggaggctgaagcaggaggattgcttgagcccaggagttcgagatcagctaggcaacatggtaagacatgaactctccaaaaaaattagccaggcatgttgttccgcacctttagtcccagctactcgggaggccgaggtgagaagatcatttgagcccaggaggttgaggatgcagtgagccatgattgcaccactgcattccagcctggatgacagagtgagatcctgtctcaaaaagcaaacacacacacacacgaaagcaagaagcaagacagctgtggaattccagagataggagacaggcaaagaacctgacctggtgcaacgaagataaaggtaacggagccagatgaggaggcttaaatgccttacaagagttaggcgttcaagttacaagtcttggccaggcgcggtggctcacgcttgtaatcccagcactttgggaggctga[132 bp omitted]gaggcaggagaatcacttgaacctgggaggtggaggttgcagtgagccaagatcacaccactgtactccaacctggtgacagagtgagactccgtctcaaaaaaaaaaaaaaaaaaagagttcagtcttgatgggcttctctgtgaagagaccctaaaggatttgagcagagaaaagaccagttgaaagctatgtttaggccagatgcagtgacttacacctgtaatcccagcaatttggtaggccagggcaggaggagcccaggagttcaagaccagcctgagcaaatagcaagaccccatgtctacaaaattttttttaattagctgggaatgatgacgcatgcctgcgataccagctactcaggaggctgaggcaggaggatcacttgagcccaggaggtcaaggctaaagtcagccacgatcaagccactgcattccagcctgggtggcagagtgagaccctgtttcaaaaagaaagaaagaaaaaaaaaagctatgtttaacctgatagaggatagagtgtagggtggcatggggcaagagctatgagagtgtaatagggaggctgagaacaccctcatgggaggtgatgagggattcaatgtggggaggaactcacagattcaggagccacttaagtaaaagttgagaaaatttgatgtctttctgggtgcaagattaaagctttccagcctggctgacctagtagatgttattttttccactgatggagacaagaaagtcaaagggagatgaatttgaggaatattgtgagatgagcgtgaggctggttgaatttgagctaaaaccaagatattcaagtgaacataggatctggaggcatcagttttggaggcaacttctggcagagtgaagagctgattccctgaaaggggatgggcattgttaggaaagccacagggagaaaaaaagaccaaggcttgaatcttggaaaatgctacactccatatcagaccatccactagcactcttccacactctactgtaatcccaattcaccagacactccaacacctctatcccttcctgctgctgagggaacttataaatattgagttactctgagctggtctttttttttttttttttttgagatggagtttcgctcttattgcccgggttggagtacagtggcacgatctcagctcaccacaacctccacctcccaggttcaagtaattctcctgcctcagccccccgagtagctgagattataggcatgcgccaccacgcccggctaattttgtatttttagcagagttggggtttctccatgttggtcaggctggtcttgaacttccgacctcaggtgatccaccagcctcagcctctcaacatgctgggatttcaggcgtgaaccaccgcgcccggcctctgagccagtcttaacacctagtcagcttgttctcccattaaatcctgagaacagacctgtgaggtagatcttccagacccattttatacaggcaaaactgagaccctgagagatgaatcaattcatagcatgtgaagtagtttccctgatttccattcagtagggcacctactatgtgccaagattggggaaaataatgatattgggccctaccctctagaggccacaatctggacagagataaggtaggcacgtaaataaggataaagtaaggtgaagcccagcagctccaggagacgtagagataaggtcttctacagtccaaagggctgaaggcatcacaggcagcttcctgaaggaggtaggcactgatgcaagtcaggcctggaggatctggggggacgtgctataacaatgactcttgtcccacaggtactgtgtccggggattgcagccgttcgggcagggggcaagggctgctgtggtgctgggtgctgtggaaaccgctgcagggtaagatccagattaagaaggaattcagggctgggggtggtgtctcatgcctgtaatcccaacactttagcaggctgaggtgggagtacggcttgagccaggagttctagaccagcccaggaaacatggcaagatccctatctctactaacaatacaaaaattagccgggcgtggtggcaagcacctgcaatctcggctacttgggaggctgaggtgggagggccgcttgagcccaggaggtccaggctgcagtaagcagtgatttaaaaaaaaaaaaaaaaaaaaaaaaagaagagaaaagatacagaaattagccaggcgtggtggcgggcacctgtaatcccagctactcaggaggctgaggcaggaaaatcacttgaaccctggaggcagaggttgcaatgggccgagatcacaccattgcactccagcctgggcaacaagagtgaaactctgtctcaaaaaaaagaaaagaaaagatacagaaattagcctggtgtggtggtgggcgcctgtaatcccagctactcaggaggctgaggcaggagattacggtgagccaagattgtgccattgcattccagcctgggcaacaagagcaaaactccgcctcaaaaaaaatgtatttttattttattttacatttatttatcttatttattttagacatagtcttggtctgtcacccaggctggagtacagtggcacgatcttggctcactgcagcttccgcctccctagttcaagccattcttgttcttccagcctcccaagtagctgggattacaggcgcctgccaccacacccagctaatttttatatttttagtagagacggggtttcactgttggccagagtggtctgaaactcctggcctcaggcgatctgccccccttggcctcccaaagtgctgggattacaggtgtgagatatcgtgcccagcctcgagtcaggtttaaaataaatttcccttcaaaccccgggcttgcagttaggctaacctgaaagccagcggccgccgagattcactggggttgtagttcccccctctccccttcacccgcctacccctcaggatcattgagatctgagatttgtgggtgccagggaagggtggggtggggcctgggagtccgcagaggagcttgtgtagctaggaattccatagagagtgctgtggttctgcaaggacaggtgcagaaacagagtccgaatttctaatttttttttttttttttctttttgagacggggtctggctctgtcgcccaggctggagtgcagtggtgcgatctcggctcattgcaacctccgcctcccatgttcaagctattctcctgcctcagcctcgggcatgtgccaccacacccggctaatttttgtattttcagtaaagacaaggtttctccatgttggccaggctggtcttgaactctcgacctcaggagatccacccgcctcagcctcccaaagtgctgagattacaggggtgagccaccgcgcccggcattaaaaaatacattttaacaacccgactggagcagatttcgataatgcgtgggggctggcgctgagcgtcgtcacccacaggtggggagattgggccttacctccccttccacaccacatccagatgctgcgctcggtcttctcctcggcgttcggggtgcttggtgccatctactgcctctcggtgtctggagctgggctccgaaatggacccagatgcttaatgaacggcgagtggggctaccacttcgaagacaccgcgtaaggtttagcctgtattcgtgtcctccattctctgcctcttccctcccgcccttcccccgtggactgggacacctgggcgggactcgacttcgagggcactcgctccacgtgggctacctgggccttagcaaatcccctgggacgtattcttgggggcggggtggcgcacgcgcacgctgccttctcccacgtggcctcacccctcccacaggggagcttacttgctcaaccgcactctatgggatcggtgcgaggcgccccctcgcgtggtcccctggaatgtgacgctcttctcgctgctggtggccgcctcctgcctggagatagtactgtgtgggatccagctggtgaacgcgaccattggtgtcttctgcggcgattgcaggaaaaaacaggtgaaatttcttgcggtggagttgtagagggaacctgcctggtcctggctgcgttctcaccttctcttttccgcaggacacacctcactgaggctccactgaccgccgggttacacctgctccttcctggacgctcactcccttgctcgctagaataaactgctttgcgctctcttctctgtctgagattgtgccttctgtaaggaggagtgtgcgagaggctacggatacacctggcctttggggcccctgcaccccacttgtactttcttaacgaatagatactgagctatttggttgcgctggaaataaggacggtaaacaagacagacaagttttattctctcaaagaacttggcattccaagagtggaagataggcaatttttaaaagaagcaaaaaattatttcaataggtaataagcactttttttttttttttttgacagggtctcgctgtcactcaggctggaaggccgtggtacgatctcggttcactgcatcctccacctcctgggctcaagcaatcctcccgtctcagcctcccaagtagctgggaccataggcatatgccaccatgccttgctaacttttttgtattttttgtagagacgaggttgcccaggctggtctcgaactcctgagcaaaagtaatcctcccacttcaggctcccaaagtattgggattacaggcttgagccaccgtgcgtggccgataagcactttttaaaagcatgttggtaatgggattgatattgacttatggagagactctcttttatgacagggaaaatttgagaaaatgaaatttgagctaagatcaggaaggcttgctaaccatctggatatttgggggattataggcagagagaacagcaaggacaaagatcctaaacagggatcagttctgtaggagaaaataatgaaaactatggaaaagacactgtaacctcttaagctctagaaaatggaactgtaaagccattgtggccttgtcacctcctaatttgatagaattttttttttttgctttttttgacagggtctcactttgtcactcaggctggagtgcagtggcacgatctcggctcattgcagcctccacctcctgggctaaagcaatcctcctgcctctgcctcctgagtagctgggactacaggcgcacaccaccatacccctgctaatttttgtactttttgtagagaggggatttcaccatgttgcccaggctggtctccaactgctgagcttaaacaatccacccacctcagcctcccagagtgctgagattacagctgtgagccaccacatctggccataatttggtagaattttcttaatcttaggtcactggttcagaaaggagacaacctaggcacctaatgggggcagggtgtctgcagactctctcagaaagccagacttcctgggcccgcacgatggtgcaagccggtaatcccaaaactttggaaggctgaagccagtggatcacttgaggtcaggagtttgagaccagcttggccaacatggggaaactccatctctactaaaaatacaaaaattagctgggcatggtggtgggtaccagtagtcccaactactcaggaggctgaggcagaagaatcgtttgaacccaggaggtggaagttgcagtgagccaagatcataccactgcactccagcctgagtgacagagtgagactccaaaaaaaaaaaaaaaaaaaaaagccagacttccatcacttgtctgaaaattatctgtttaagtgcgtttttctcgagtccataacttttcagcaatctaccatagacccctgagaccaaatccaaatgtatgcctcacctaatgctaagttaggaggggaaaagg[327 bp omitted]aataaataaattaataaataaataaatgaaataaacaggcgagaccaaagtcaactcagagaagctttaatagcaagaggtgggactagcctcctggcccgggagagagcggcggcggcggcgccgttcaactgcggcagcagaataagcgcgcgtcgttcagcgcagtgtcatcgccgaggcctctaggtccctggatcttggtctgcaggccgcacgcgcccttggggcaatggtcactccagtctccaaagtctccccagctcagcccaggcccctgcagttcctcgccgtctgaacagcggaagcgcacgttgttcgctgctgtgttgtcaccgagggtcgtgggtgcctccacgcgaagcgagaaagccactaggtaggcgccgccgcgacaccacagcggctcactccattcgccccagctgcaaggcaaagggagatgcgttgcctctgcgggccccccattcaccaagcccttgagactttccaagccaagtgctgtgtatatgacctggtgggctgggtgctccccgacctccgccgaggagcggaggaggggtcttccatccacccttcgcctccccggtctatactgccccgtagctctggcggagccagcctgcctgttgcgacggagtatgtaatagagggtaagggacataccatcaccccaagggatcctcgacccctgcgccccaccttccagactgggactctaccacgtgcgtattgcctaggacgttcccgcgcgcgcagtgcagcctgatcccattcagtgcagtgtcgtcgccaggaatgccttggggaggctccacctgggtatcgaggagaggggcaagggcgagtcacggaattatcatccttggctctatggtcccacgcatctccgccctctccaggacctacgcctgagccccaaccttgagcgagaacccgctggcgaagaatccatcgggacacatctcaggccaggcccagtcgccccagggacccccgctggtcacttcgatgaccgccgtgtagccgttccggccatctgtctgtgcacatgtgaaaccagtcgcccgcagaagcagcagcagcggcagcagcttggctcctgcgccccgctccatcctgtagcgtctgtgaatcaggcctcctaagcagatttatatcagtttggcctctgtgagggctccgattgcggaagggcctcccagattaagtgaaacccaaaactaatccactcccggaaccctatttcctgctcccggaggcagaggctcccagagctagggtaggaggggcagtgagagagggcgaattaaaataaccatcacctactgaatatttactataggctacgaattatggttagcgctttgcagtattttgtttaaccctcacaacaatttttggggggtgagaattatccttcctattttgtagatgagggaactggctcaaaaatggcaagcaacttgccttaggtttacagccaagcaagctgggaaacattccagcagtgagagtggagacagagcagagaccagggctagggatggaagtgacctcccgggagtcccaccagtgacgggatggggcaagagcaacccagagacctccaggatgtgaggggacatcagagtgaggataggacaagaatcctcgaactggagaagctgagaaaactcctgtcagctcagaagtctcttcctcctctgagaggtcttctgagagctcagggccctaacaccttgagaatccgggacactcctccctaccttagaagaagacatatacaaacagaaataattcttttttatttttattttttgagtcgaagtctcactctgtcgcccagtggcggcatcgcagtggcgcgatctcggctcactgctacctccacctcctgggttcaagcgattctcctgcctcagcctcccgagtagctgggactacaggcgcgcgccaagacgccgccccgctaatttttgtatttttagtagagaccgggtt[133 bp omitted]caggagactaagaacccctaagaaaagatcatgctgtttcttccattgctttctgtatccttatatcctttcctggaatgcctttccccctgtgaccaccagatggactcctaatttgcaaaacaaaaagcgagaaaatctggctaagtatgttttttgtttgtttgtttgtttgtttgttttgagacgaagtctcactctgttgcccaggttggagtgcagtgacgccatctcggctcactgcaacctctgcctcccgggttcaagcgattctcttcccttaacctcccgagtagctgggattataggcgttcgccaccacgcccggctaatttgtatatttttagta[143 bp omitted]atttacctgcccctcatacacactcctttgtttattcaatacctatttagcaataatatgttttggcttaagcaatattccacttgctgtaagcaagaataacaaggcccctgtcatcagaggtcacattccagtgggggagacagaggataaattctcccccagtggaccttgagctctgtgaaggcacttttgtattcttgaagcctagtacgtgcggaagtacttaataaaagttggtgcaatgaatgattgaagagccaatctggagttttgaaaattaaaccacaaaaatgcaaaaggataaagcctgacgtacgtatatgattgcaagaggtcatgtatccaggtcaagacaaagtcccctgggaataagatagagaatttagaagtgggtgttcccggctgggcgcggtggtttacgcctgtaatcccagcactttgggaggccaagttgggcggatcacaaggtcaggagttcgagaccagcctgtccagtatggtgaaaccctgtctctactaaaaatgtaaaaattagccggcactttccagcctgggcgacagagcgagactttgtctcaaaaaacaaaaaaacaaaaaacaaacaaaaaaaaaaagagagcgagagagaagtgggtgttccctggatcccagagccggacaatgcttgaacttaataagatttatagggcaattgtggtcagcttttccatttagtgttttcacatacgttatcatttaatcctcacatgaggcttgcaaagtacctattattatcctcaatttacagtggagggaactcaagcccagagtgaatttagggcccacaccactgctcagtaggggagctgttctgggccctgcctctcttcccaatactcagagtgcctcttgctacagctggccctacagggaagggaaatgcactgatctgtcactgctgtcgaatcccccaaattcccttcacccagttcctcgcacccagggtagctgccctttggggcgaagggcacaggggaaggggccttagtaggttaattattaatcctttgcgcctcagggcaccacgggcttctgtcccctcctggaggcggagggacacggactggctaggcgctggtgagggggcggcggtcccagcagcaggcatgggagtggcggcgcggcccccagccctgcggcactggttcagccactcaattcctctcgctatcttcgcgctgctgctgctttatctcagtgttcggagcctaggtgagctgccccttccctcacttgctccgggaggaagcccggaatccaggccctcacgactcaagcctctttctcgagccctcaccgctccgcttctcctctacccaggcgcccgctcgggctgcggacccagggcgcagccctgcgttccaggggaaacggcgcccttccaggtacgctaggcgcaggattgggcgcgggcgctccaggagggaccagaacagggggacgtggagccaggctgagggtccggcaaagggcgggtcctcccccggtctaccctctcccgtcggaagctgagcgcacagcagaagagccgccagctaaaccttcggaacaatttcttcagggcagaatctgctcccacctcttcccatcgtgtctccccaccaggtccggcaggagtcgggaaccctggaggccccggagaggaaacagcctccgtgtctgggccctcgggggatgctgggccgcatgatgaggcggttccacgccagtctgaaacccgaaggggatgtggggctgtcgccgtacctggcgggatggagggcactcgtcgagtgagtggcctcccgccccccagccggtccccgcctccttggcggctccatctccattctctcaaatcgtctcgcccgcaggttcctgactcccctcggctccgtcttcgccttcgccactagggaggccttcaccaaggtgacagacctggaggctcgggtgcacggcccggacgcggagcactactggtcgctggtggccatggcggcgtgggagcggagggcgggactgctggagcagccgggggcggccccccgggacccgacccggagctcgggctctcgcacgctgctcctgctgcaccgcgcgctgcgctggtcccagctctgcctccaccgggtggcgaccggcgcgctgggaggcccggacgcgggcgtgcagtgcagcgacgcctaccgtgcggccctgggtccgcatcacccctggctggtccgacagaccgcccgcctcgccttcctcgccttcccgggtcgccgccgcctgctggagctggcgtgtcccggagccaccgaggcggaggcgcgggccgcgctggtccgggccgccggcaccttggaggatgtctacaaccgcacccagagcctgctggccgagcgcggcctgctccagctggcctaagacggcggctgcggggaccggcgggaacggagcggaccgcccggggtggggccgcgcagcccggggtcagtcctgcagcccgcgccgcggccgcctccgtatcccgcctcttccgtgacgtcgccgcggcgagggccgcccccggcagggaatggcgttgagctccctctgtccgcagtctcggaaagacgggaggagctgtgaggaataaaaaagcaatatttggcagcgtcgacgtagggcgttttgtgtgatgacgacaggcgcttaagggaaataaaaaacgaaggtgagaagatgtgtcatctctgttctcggcagccgagagactcacgctcccccggcctatcgtagtcactcccgtggcttcggttgccaaacacacgctgagtctccagcccagacttgtccctgagcttcacccctgtgcagccaagtgactccacggccactcccacaatgaacatgaaagatcttgccatttcatacactgataacttccaaatcacaacttcaatccactttctcctggactccagaatcctacatatacgattgcctattcggtatttccacttggatgtcacctaggcatagcaaacctaccatgtccaacactaagctccaacacgccctccccacgaaaattctcccttcatagtctttgctggctcaaatgacacttcattcttccaggtcctcagaccaaaaacctcgtcatccagacccttctgggttgttttttcgttttggtttggttttctttcttttttttttttttttttctgagacagagtttctctcttgttacccaggctggagtgcaatggcgcgatcttggctcaccgcaacctccacctcccgggttcaagcaattctcctgcctcagcctcccaagtagctgggattacaggcatgcaccaccacaccaggctactttttgtatttttagtagagacaggctgtctacgtgttggtcaggctggtcttgaattcccgacctcaggttatccgcccgcctcggcctcccaaagtgcagggattacaggtgtgaggcactgcgcccagccccagcccttctgtttctctttcatcatatcagcatccaatctgtgaaaatctgagcagtgcccactttctccactcctagtacctttgactatgaagggagactatatcctagattactgcactagcctcctcattgtttctctgtccatcctttccctccctataatgtattttattttatttttgtgccccctctcccaccctcctataatgtattttattttttttatttatttacttattttgagacggagtttcactattgtcactgaggctggagtgcagtggcgcaatctcgcctcactgcaacctccacctcccaggttcaagtgattcttctgcctcagcctcctgagtagctgggattacaggcgtaatcccaccaccactcccagctaatttttgtatttttagtagagacggggttttgctacgttggccaggctggtcttgaacttctgacctcaggtgatccacccacctccgcctcccaaagtgctgggattataggtgtgagccaccgcgcctggccaacgattgttttttattacgagagaatgttggatttttaaactgcttttctgagtttattgagataattttccatttttcctttattaatatggtatattgcattaattttcatatgttgaaccaatgttgtattcctttttttttttttttttgagaacaactcttgctctgttgcccaggctggagtgcagtggcacgatctaggctcactgaaacttctgcctcccgagttcaagtgattctcctgcctcagcctcccgagtagctgggactacaggcacaccaccatgccaggctaatttttgtatttttagtagagactggccaacatggtgaaaccccgtctctactaaaagtacaaaaattagccaggtacggtggcatgtgcctgtaatcccaacactttggaaggagaatcactggaacccgggaggcagagcctgcagtgagccgaaattgtgccactgcactccagcttggacaacagcacaagactctgtctcaaaaaaacaaaaaacaaaaaagaaaaaaacaacaaacaaaaaaaaaatcaacaaactaggaatagaagggaacttcccctgcctaggcatctgtgaaaaacccagggctaacagcactctcaatgatgaaagacttttccctaagctttctcctaagcttttcccctaaaatgagaaacaagacaaagatgtctgcttttgccaatctattcaacattgtgctgaagtaactagccagagcaactgggcaagataatgaaataaaaagcatccagattggaaaggaagagataaaattatctctatttgcagatgatatgatggtttatatagaaaaaccctaaagaatatagacacaaacttttagaactaataaatggccaggcacggtggctcacgcctgtaatccgaacactgggaggctgaggcaggcagatcacgaggtcaggagttcaagaccagcctgaccaacatggtgaaactccatctctactaaaaatacaaaaattagctgggcatggtggcactcacaggagaactgcttgagcccgggaggtggagactgcagtgagccgagattgcgccactgtactccagcctgggcaacagagtaagactgtctcaaaaacaaaacaaacaaacaaacaaaaagaactaataaatggttcaatgaagttgcagaatacaagatcaaaaccaaaatcagttgtatttctatgtactagcaatgaacaatccaaaaatgaaattaagaagacaatgtcacttataacagcatcaaaaagaataaaatacttgggaacaaatttaaccaaagaagtgcaagacctatat[144 bp omitted]ccccgtctctactaaaattacaaaaattagcctggcgtggtggcaggcgcctgtagtcgcagctacttcagaggctgaggcaaaagaactgcttgaacctgggaggtggaagttgcagtgagccaagatcacgccactgttctccagcctgggtgacagagcaagatctgtcaagaaagaaaagaaaagaaagaacgaaggaaggaaggaaggaaagaaaagaaaaggagaaaagaaaagaaaagaaaagaagtactacaaagctacagtaatagagacaatatgatactggcataggatagacatatagatcaatgaaacaaaactgagaatccagaagtaagtccatacatgtatggtcaatgatttttaacaagggtgccaagatcattcaatggggagacagtctttttttttttttttttttttttgagacggagtcttgctctgttgcccaggcttgggagtgcagcggcccgatctcggctcactgcaagctccgcctcctggtctcagaccattctcctgcctcagcctcccgagtagctgggactataggcgcccaccactacacccggctaattttttttttgtatttttagtagaggggtttcaccg[136 bp omitted]atccatatgcaaaagcatggatttggacttctacttcacatcacatacaaaaattaactcaaaatggaccacagacctaaaaatgtaagagctggcactataaactttcatgcttcaaagaacaccaatgaaggacatgaaaagacaatccaatgggagaaaatattttcaaatcatgtatctgatgtttctagtacctagaatattaaaaaggacccttacaactcaacaataaaaagacaaatagagccaggcacagtggctcatgcctgtaatcctagcactttcggaggccgaggcgggaggatcacctgaggttaggagttcgagaccggcctggccaacatggcgaaaccccatctctttaataaaaatacaaaaattagccgggcatggtggcgcatgcctgtaatcccagctacttgggaggctggggcaagagaattgctggaacccgggaggcggaagc[226 bp omitted]gaggcaggagaatggcgtgaacccgggaagcggagcttgcagtgagccgagattgcgccactgcagtccgcagtcccgcctgggcgacagagcgagactccgtctcaaaaaaaaaaaaaaaaaaaaaaaaagacaaatagagctgggttcagtggcacacacctgtagtcccagctacttgagaagctgaggcgggaggatcactggagcccaggagttcgaggctgatatagtgcaccatgatcccatctgcactccagcctgggaaacaccgcaagacaaacccaccccacacacacaccccaccctcgtctcaaaaaaaaaaaattaaaccccaaaaatatattaaacaaaagacatatcccaattttagaatgtgcaaagaacttgaaaaaacattgcatcaaaaaagacatacaaatggccaattatctcatggaaatatgctcagcatcactaatcattagaaaaataccaatgaaaaccacagggtaccacttcacacccactggaatggctataactaaaaaaatgcacaataacaagtgttggtgaggatgtggagaaattggaaccctcacacatggcttgtagggatgtaaaatggtgcagtttctgtggaaaacagtttgtcggttgctcaaaatgttaaacatacagttatcatagaacccataaattcctctgccagcatatactcctaagtatataactaaaagaaatgaaaacatggtgtggtcactttagcccaaagactctcaggtttattttgtgggccctttggactgtaactccataagatcggtacggcgcaagccactaggactgttttttgttttgttttgtttttgcttttgttttgagacagtcttgctctgtcgctcaggctggagtgcagtggcgtgatctcggctcactgtaacctccgcctcccaggctcaagcgattctcctgcctcagcctccccagtagccgggattacaggcgcgccccaccacgcccggctaatttttgtattttttagtagagaaggagtttcaccatgttggccaggctggtcttgaactcctaacctcatgatccgcccgcctcagcctcccaaagtgccgaacggtttttgggttttttttggttttttggggggggggttttgctgactttcttgttttgtttgttgcttgccacgctgccatcaagtgctcactgtcgcaaaagaaccgtccccatgcagtactgtacttttcttttcccttctgccgtcaacctcggagtagcttcgctcccagaaggcctcaaagcgcgaccaaagagcgtgacagagcgctttacgacagttgctttgaggcagtaccggaggagaaagatggcggctaccttactagctgctcggggagccgggccagcaccggcttgggggccggaggcgttcactccagactgggaaagccgagaagtttccactggggtgaggaaggaatcggggttcataggacgtgcacaaggcctgacgcgatgggaagataaagcctgagtggggttgagagatctggcaggggtggagaggaggtggaatgtgttgtgctccaggaatggggagaggtaccccgaagatggtggagtggtgcggtagcttcgtagtgggaggtggagggtgggctgaagtttgaaattctgaaatcctgcgaggctagtgaggatcttgggcttaagtacgggatgagtcttttgagatttgagggttggcattctggtattctgcggggtgctgaggcccctataagatttgaaaatggttcagcgacggacagattttgtatttttggaactaggtagagagatcattgaggtttgtgtctgctggagaatgtagacttactcctttttcccttttcccagaccactatcatggccgtgcagtttgacgggggcgtggttctgggggcggactccagaacaaccactgggtgagctcaggacagatttgtgaaaggtcttcccatcttccttttcctttcctgcctgccagcccaccctgcctgcctccacagaccactgtgggaagagaggtttcttctctctctggagataaagatttgtcccaacttttgttactttcagttcccctcactcgttagtggaatccttacaaaagtctgttctccagcccgcttcagtttggatgagaataagcaatactggaggccaggcacggtggctcacgcctgtaatcccagtactttgggaggccgaggcgggtggatcacctgaggtcaggagttcgagaccagcctggccaacatggcgaaaccccgtctctactaaaaaatacaaaaattagccgtgcgtggcggtgcgtgcctgcagtcccagctacttgggaggctagggctagagaatcgcttggacccaggaggtggatgttgcagtgagcagagatcgcgtcactgtactccagcctgggcaacagagcgagactccatctcaaagaaaaaggaaaaaaaggcaatactggacatcctatccctgagccctaagagagtgggtagtgatgggatggaggtggaagacaggtgggctcctttcctcactattctgccatcctgcaggtcctacatcgccaatcgagtgactgacaagctgacacctattcacgaccgcattttctgctgtcgctcaggctcagctgctgatacccaggcagtagctgatgctgtcacctaccagctcggtttccacaggtgcttgtgggcaggggaggggcaagtatctgaagggagttggaagctgaggagctaaatagcctgacttctaggtcttgaaactttctctgtgacttccctgaccctctagcattgaactgaatgagcctccactggtccacacagcagccagcctctttaaggagatgtgttaccgataccgggaagacctgatggcgggaatcatcatcgcaggctgggaccctcaagaaggagggcaggtcagatccccacccgaccagagcacacttgagccaggacttttatcctctccccagccattttctttttctttccagtctctacctcacttattcttactattaacgtgcctcagaccaatagcagaatggacaggtgaatgtacgtgtgttggagggaggatacgactggtgactcctctccttctatctggcaggtgtactcagtgcctatggggggtatgatggtaaggcagtcctttgccattggaggctccgggagctcctacatctatggctatgttgatgctacctaccgggaaggcatgaccaaggaagagtgtctgcaattcactgccaatggtgagagcttaggcttctgggcctatgagcttcaaccccaactacccaagccaggccagcattcctcattccttgcagtgatcccggcatctgaatctgaacccagctttcttcttttatccacagctctcgctttggccatggagcgggatggctccagtggaggagtgatccgcctggcagccattgcagagtcaggggtagagcggcaagtacttttgggagaccagatacccaaattcgccgttgccactttaccacccgcctgaatcctgggattctagtatgcaataagagatgccctgtactgatgcaaaatttaataaagtttgtcacagagaatctttgtactttggggttcttttttttttgacttcaagtccgaatttgtctggcccattcctatttgtaaaaaccattgcactgaactcagagcaagttggagaggagatgaaaggagtttatgaatgctttattccccagtaaacttttacatgggtggttttcaaacctcttctccaaattgccttcccccaaacttcctttcccccaccatatccaggtccttgaaccactggattgtggttggtgttgggggtaccagcaacacccactccctgttcaagcccaaggtggaactcggaattctgactaaaactggagtcaccttccttcagcctgcttcctgccagtcatcctgggtgactactgtccctaaggccacaaagaccagcctcctccagcccagcctcatggtcccctctctccacacttaacctctgttacctcaccttgtggtcagcagtagcactgtgacttccttggcttttgggagaaaggtgggccttgtctgcaaatggaatttaagatgaatgatgagtgggagaacaaaaccactgggagtggtttggccagctctggaagccaccattcccatggtagggggtgtgatcaacctcttggatgagaggctgaaaatagactctggcccttccgaagctgtccccactcaagccagggacataaaggagctcgatagctgggactacaggtgtgtgtcacctcacctcaggctaattttattattatgtattttttagagacagagtctcgctctgtcatccaggcagcagtgtcactgtcatagctcactgtaacctcaaactcctgggcttaagtgattctcctgcctcagcctaccagtgtgctgggattacaggcatgagccactgtgcccatcctttttttattttatttagttatttattttattttttttgagatggagtctcactctgttgcccgggctggagtgcagtagcctggtcttggctcactgcaacctccgcctcccgggttctggcgattctcttgtctcagcctcccaagtaggtgggattataggcgggcaccactgtgcctggctagtttttgtatttttagtagagatggggttttgccaagttgaccaggctggtcttgaactcctgacctcaggtgatccacccacctcagcctccaaaagttctgggattacaggcatgagccaccacacccggccttaaatattttttagagacaaggtctccctatgttgcccaagctggtcttgaagtggcctcaagagatcctcttgcctcagcctcttgagtagctgggattataggcgtgagccactgcacccagctctttttaaataaattttttttttttttttttgagacagtgtttcactcttattgcccaggctggaatgcaatggcgtgatcttggctcactgcaacctgcacatcccggattcaagcaattctcctgtctcagcctcccgagtagctgggattacaggcatgcgccaccacattcagctaattttgtatttttagtagagacggagtttctccactttggtcaggctggtctcaaactcccgacctcaggtgatccacctgccttggcctcccaaattttttttttcttttaagacagagtctggctctgtcccccaggctggagtgcagtggtgtgatctcggctcactgcaacctccacctcctgggttcaagtgattctcctgcctcagcctcctgagtagctgggattataggcgtccaccaccacgtctggctaatttttttgtatttttagtagagacagggttccaccaa[137 bp omitted]aattgagtcgaaaatacagatatttcccatgtgctcctctccccacgtgggcaacctcccccactgtcaacattctgcaccagagatggccatttgttggaactagtaaacctgcactgacacatcactcccagatttccacatggctgctcatcattcagctctcagctcaaatgtcacctcatcagaaaggcctttcccaaccacctgaaactgaagaatcaccaccccctaatcccactctcacatgaccctgtttcattttcttcaaagcagcacacatcaccatcttgggttctgcttagctgttacctgtgtatgattgtctccctccctctactagcaagtcagttcagtgagaagagagaattgttccttcctggttcattgatacatcctccacgcctggcaggggtggacactcggcatttactgaatgaatatgctttctcatcccatctgctatcctgccctgcccccagccaccccagcctgccttcaccacactcaaccccgaagcttgacgtcagccaattcttactttcccgcttgtcacacctgggctctgcgttaggtcagctgcctcatattcatcattcgtgtgtctcactcccaccgtagacaacacttcccatctcagccccataacccagccctgcagccttggccccatctacacccccagcacacacacacacagcacttagcaactatgaacacatttgatgagaaggttagaaaggacttggggaggtggacattaggatcgctgagaaatctggggaaggaagcttgctaagccttcctggaggttcacctcctcgtcgtccccttcaaatggtggagtcattggccgatgctatgtcatgcagctggtggcggaaggagagtcgggctttcctgctgaagtaggcaccaggccctggcgagggtacccctccctcagccatggtgggggctatagctggactgggatctggaggggcagcaggactcaggcctaaaagattggaggaagaaggaagttgtaggtcagggttcacctcctccctcacccccaacccagggttgaggagggaagaagcaagggaagacacctggggcctgggggctggtgaggagtgttggtggcagcagcagggggagggagaggggctgttgcagagcaagcaggactggctcgcacacatgtgacctgtgcagttgcataggatcctccgactcagaagggccaccatgcttggcataggtctctgctgtcaccatcttgaaattcttaatttttttttttttttgagacagtctcactctgttgcccaggctggagtacaatggcactatttcggctcactgcaacctccgcctcccgggttcaagtgattctcctgcctcagcctcccgagtagctgggactacaggcgcccgccaccacacccggctaattttttgtatttttagtagaggtgggtttcaccgtgttagccaggatggtctccatcccctgacctcgtgatctacccaccttggcctcccaaagtgctaggattacaggcatgagccaccgtacccggccgaaattcttaaattgttaacaaggggccccacttggtcatttcgaactgggccctacaaagtatttagcctgtcctgtgaggacttcggtgatccatctcccacccagggagacagatgatccttttccctttgctggtttgagcatttctctccctgccatgcagttgtctctctgtctgcctgacagccccgctttaccctcagtctactccatacctgctcctctttcagtcccccgctgcctccggcacccgcaccatgggaaacaccatgcccccttcagacccatctcaacagtggaggcgatcagagctgggaatggccaggagggcccccgggagaggggtgtggtttccaagcccccccaccatgggcaaaactaccacttagcctcagaccgcctggtgattacaggcgccagggatggaaaggggagaggagggaggaagaaaggggtgggggtacactcccattcagacacctatttttatgccccattaatttgggggtcctttctgatccccatggagaagcaggaggtggttgggagaggtggcacggcagggacagacgcagaggtgctgtgacagacagatgcagtcacatttcactatggcaatgcccgacaacttggcgccaggctggacaccgctggggattcctttgtattttagaatgagaattgaagtgcccaagatgtaaactttcaaagaatactctatttttttagaataagaaactttattattcagggaaatgttagattctcattaaatggtctgatagttcctgtcccctgttatgaagatgattgtaattgattaattatgctgtgtcaggtaaatgctagagacttttacatgttgtctcatttcacttaatcacgtcaaagatcttttttttgggggacagagtctcactctctcgcccagggtggagtgcagtggcgcaatctcggctcactgcaactctgcctcctgggttgaagtgattttcctgcctc[136 bp omitted]tgtcctcccaaagtgctgggattacaggtgtgagccaccgcacccggcctcaaagatcttttgaggtaagtccctcactggttaggtgagtctatcctggttttacagatgtgaaaaagcaggcactgagaggtaaggtaatttgcccaaggtcacgcaggcagttattagccgagtaggaaccatgcccagctcaca[146 bp omitted]tcccgggttcacgccattctcctgcctcagcctcctgagtagctgggactataggcgcccaccaccacacccggctaattttttttgtatttttagtagagatggggttt[132 bp omitted]ctgttgtccaggctggattacagtggtgcaatctcgtctcactgcaacctccgtctccagggctcaagcgagtctcctgtcccagcctcccaagtagctgggattacaggcacccgccaccatccccagccacattttgtatttttagtagagatgggctttcaccacgttggccaggctgttctccaactcctgacctcaagtgatctgcctgcctcagcctcccaaagtgctgggattacaggcatcagccaccacacccagcccagaatctactcttttgaccagtacactgagcttctgaagcatgtccccaagcaagcatcgatgccctcagacagtttggggtggccagagccaaggctgggagcatctagtcaagagcatcctagccaaggactctaagtgctcttaagtaaagctgtggaagtgctgtgttttttttcttttttcttttttttttttttgagatggagtctcgctctgttgcccaggctggagtgcagtggcacgatctcagctcactgcaacc[135 bp omitted]ctcgatatcgtgacctcgtgatctgccctcctcagcctcgcaaagtgctgggattccaagcgtgagccactgcgcccagccacaagtgctgtttcatcattccctgagggtgccacaacgtggggagtgttaggttgctgattacagggtactgcctgagttacacagaaatgtttctttcttttttttttttttttgagacagtctcactctgtcaccaggccggagtgtagtggcactgtcccggctcactgcaatttctgactccctggttcaaatgattctcctgcctcagcctcccgagtagtacgcatcaccacactcagctaattttttgtatttttagtagagacgg[135 bp omitted]gcaaaaatgcacatacaatgtaatgcacacatcttaacgtacagttccatgagtattaccaagtgtatgctcctatgcaatcaccactcctatcaaaatacagggcattcttatcatcctggaatgttccctcacgtgtccctttacaggcaatcttttccctacaccctgccacaagcaactactgatct[135 bp omitted]ccaacatggaggaaccccgtctctactaaaaatacaaaaaattagctaggcgtggtggcaggtgcctgtaatcccagctactcaggaggctgaggcaggagagaacccgggaggcggaggttgcagtgagccgagatcgcgccattgcactccagcctgggca[224 bp omitted]atcacgccactgcagtccagcatgggcaacaagagcgagactctggccgggcgcggtggctcacgcctgtaatcccagtactttggaaggccgaggagggcggatcacaaggtcaagagatcgagaccatcctggataacacggtgagaccccgtttctactaaaaatacaaaaaaaattagctgggcgtggtggcggacgcctgtagtcccagctactcaggaggctgaggcaggagaatggcgtgaacctgggaggcggagcttgcagtgagccgagatcgcgccactgcactccagcctgggcaacacagcaagactccatctcaaaaaaagaaaaaaaaagagcgagactccgtctcataaaaataaaaataaaaataaataaaaaatagcaaaagactgaataggcactttataaaagaagacatacaaatggccaatcagcacatgaaacatggtcaatatcattgatctccagacaaatgcaaatcaaattgcaatgatgtgcccacaacacccattaaatggccaacgctaaagactgacaatatccaacgttggccatgccatggaataactggaaccaccatacactgattttggaaatctagaatggaaaaaccatttagaaaaaaatcgtttggcagtttcttataagttaaacacacactgatatgatcgaacaactccactccctagttacccaagataaaggaaaactatccacgcaaacttacaggaatgtttacaggagctaaaacaatgggcaaaactagaaacccacatgtatatcaaaagagaaaaataaatctgctttttaaaaaagattgaaatatcttgtattttaatacccgaaaaaattttatttccccctagactgccaattccagctgagcaggctctctaaccatcttatttactaccatactctcaatttctggcacggagtaagcgcgcaataaatgtttggtgaatgaatgaaagaatgcccgctttcatacactaatgggtttgtagccaccacccctcaggccttttacgccctcattccttccaggtacaaacgctatctgggctaggccaaatgtggctcgcagcgggtccgggagcggggcacctaccggcagctcccgcagcggaggcgcgtcccccgggcgccgaggcagcgcccgcggctggaggggcccggggcgggcgccgagcccgagggatgcgcgcagcgcggggtgccccgggaggcagcggccgggcacgctgggaccgacggcgcgggacgccccgacgccgggcagcacttacccgccgcaccgagagagctacgcggccccgcggccctgcagggcacagggcggccccctgcccggggctctcggtggcgcactgggcggcggggcgggccgagggcagcgggggcgggacaggacagacgagaatcccgcggaggtgaggccgggggccgccccgcccccgagggcaggccctgagccccggccccgcctcggccggccccgcctcggccggggcgtgggctccggctgcagctccggtctgctctcttggctccggaacccccgcgggcgctggctccgtctgccagggtgagggggccgggaaggggcgcgcgggggtcccgggtctcggaaatcgggcggggacggaacgggctcgggctgcggggcctccagactcagtcgcacgctcagatttcgggatttctacccccggctgggatcgcgtaacttcctcattcccgcctggacccctgcccccggcccgcctggcctggcgtgagccccgtagccgcgcgctctccggaccacccagggccgcttccccgcgcagctgctgcgccgccccaggtcggagccttccgggcctggctgggtgttccccggggctctggttacgggacggggcggggggcggggggcgggactgggattgtggatgaaggactaaggtaggggatgggggctcgaaggggtcggtggggcgttgcaaactggtcaggcgtcatccgcgggcggtcaggaggccgtgggggaagaggaggatctggaagagatggaggacctgcgggagttaggatggggggcgggttctgcaggacagctcgcctccctgaggcttcccaatgttcctaggatgacggcgacccctgagagcctcttccccactggggacgaactggactccagccagctccagatggagtccgatgaggtggacaccctgaaggagggagaggacccaggtacacagggaagatggatggccctcagggaggagaggcgttcgggagccagggggctggggcctgttgtggtctacactcctcgactttctttcctcccagccgaccggatgcacccgtttctggccatctatgagcttcagtctctgaaagtgcaccccttggtgttcgcacctggggtccctgtcacagcccaggtggtgggcaccgaaagatataccagcggatccaaggtggccagactggccccagggagggggaaagggagggcggcccggaatggatccaaggtggctgggctggccccagggaaggggcaaaaggagggctggccagagtggggaggcggggacccacgcaggggacatccattcagttcctcatacccctaggtgggaacctgcactctgtattctgtccgcttgactcacggcgacttttcctggacaaccaagaagaaataccgtcattttcaggagctgcatcgggacctcctgagacacaaagtcttgatgagtctgctccctctggctcggtgagggcgaccggactgcttcctgtagagggcaggtgctccccaccctcctttctgtctgtctcaccccggggccacaacctttcctccctgcaactctggccactgtgctgcctcccctgaccccagttaccaggaaactttccctgctcagctttccctgtccatggttctgtgccagcatctcagctgggcgggatgcccaaaatgctcttggcagcctcacccttttctagtctccattcccagggtagggggcctccgttttgccagcctctaggccttttgtttgttttttgtttttgttttgtacaaggtctccctctgtcacccaggctagagtgcagtggtatgatcttggctcatggcaacctcctgggctcaagcagtcctcccgtctcagcctccagagtagctaggaccacagccaccacacccaactaatttttgtatattttgtagagatggggtgctgctgtgttgcccaggctggtcttaaattcctgagctcaagtgatccacctgctgcggcctccccaagtgctgggattccaggcgtgagccaccacgcctggccacctccaggcctcttcttttcctccgagccccatctccagtgttttcaggaaccagagcacccagcctcccagctcttacctgaccttcatccatcctttccacagatttgccgttgcctattctccagcccgagatgcaggcaacagagagatgccctctctaccccgggcaggtcctgagggctccaccagacatgcagccagcaaacaggtgggaccagatgccaggtcctccgggaaggcattggaggtgcaaatggctcggtcccatctgtctctctctctctctcatctccacttcagaaatacctggagaattacctcaaccgtctcttgaccatgtctttctatcgcaactaccatgccatggtaaggtccaggggccgattttagatgtggagcaggattatcagaccctcggggaggagggccaggggccccagggtctgaggggctgaaagccaggtgtctcctccgggcttttgttttcctctgcagacagagttcctggaagtcagtcagctgtcctttatcccggacttgggccgcaaaggactgtgagtgtctggcccccttcacccaggcatccgtagacatcactcttaatttctccctgcctgagattggggcaagcagtgcagggtgggctgggggtctggagtcctcatcccgcctctcttcctgattgtcccacagggaggggatgatccggaagcgctcaggtggccaccgtgttcctggcctcacctgctgtggccgagaccaagtttgttatcgctggtccaagaggtacgggctatggccaagcagctgggcagtgggtgggggtgaggaagaaaattttgagggcagagaggaacacacggagcccttctgctctaggtggctggtggtgaaggactccttcctgctgtacatgtgcctcgagacaggtgccatctcatttgttcagctctttgaccctggctttgaggtgcaagtggggaaaaggagcacggaggcacggcacggcgtgcggatcgatacctcccacaggtgaggcctccctggggtgagagacaccagctgagtggtgagcccacccacggccttgctgggagttgagaaagagagaccacaggagagaggaaggcttttccacctccctggatcgggacatagttttgaaccaggaactggtctagccagatgcttgggactgctcttagactgggcccagagaaaggggattagtagaagcctgggaagggaactgctgacataaacgaaattccatttgttcatttgttcattcaacaaacccgagtgcctggtacaatactggttgctgatgcaatactagga[138 bp omitted]tctactaaaaatacaaaaattagccgggcgtggtggtgcgtgcctgtaatcccagctatttgggaggctgaggcaggagaatcgcttgaagctggggtgcagaggttgcagtgagcagagatcgcaccactgcactccagcctgggggacaagagctaaactctgtctcaaaaataaataaataaataaggcagatacatacacgccctatccctgtgcagttgtgattagggactaagggaggaagtgggaaaggggaggtctctaggcaagatcacaggtatggagggcgaggatttatggacatctcatcgttcccatccaggtccttgattctcaagtgcagcagctaccggcaggcacggtggtgggcccaagagatcactgagctggcacagggcccaggcagagacttcctacagctgcaccggcatgacagctacgccccaccccggcctgggaccttggcccggtggtgagacactgacatcccttctgagcttgtctgtggctttcttgaccccctgtgtaatctctgagtccttcatcctctcttttctcatctgaaccctcctgacctcaatgacccgccccgtgacttctttaatcttcctgacctttgacatctttaaccacattgatctctctgatttcgcgccgacctttctgacccccaaacttggtcatctcttctgacccttgacctctctaacctcctataaccttttaaacccctctctacaatactgaccctctctgttctccatgatcttctcaaatctctctgatttagtccttcatttaataaacattttcttttctttttttttttttttttttttgagagagagttttgttctgttgatctcggctcactgcaacctccgcctcccaggttcaagcgattcttctgcctcagcctcccgagtagccgggattacaggcgcccaccaccacacctggctaatttttgtatttttagtagagacgggggtttcaccatgttggccaggctcttctcgaactcctgacctcgggtgatccgcccgcctcggcctcccgaagtgctgggattacaggcgtgagccaccgtgcccagccttaataaacatttttctaagcacctagcagtgctggcagtaacacacagtcctctctgggttagggaagtaggtgatcaaatcgtgaaacaatgtgaacttgccgtactggtgataggtagaaggtgacacgcacagacaggaagtacctggcccagcagggatatcaggacaggtttccaggaggtggtgaccctcaggtagttttgctttaaatcagagactgacacaatattaattttgttggtttttgttggagacagtgtcttgctctgtcaccaggcgtgtagtgcagtagtgtgatcatggctcacggcaacttcaacctcccaggctcaaatcatcctcctgcctcagcctcccaagtagctgagactacagacacatgccaccacacccggctaattaaaaacatttttttttacaaaaaattttaaaaattagacgggtgtggtctcgaactcctgggctcaagggatcatcctgcctcggcctccccaaagtgctggattgcaggcatgagcgacagtgcctggcctatatacttttttttttttaaggcagagtttcgctcttgttgcccaggctagcgtgcagtggcacaatctcagctcactgcaacctcagcctcccaggttcaagggattctcctgcctcagcctcccaagtagctgggatcacaggtgcatgccaccacacccagctaatttttgttttggttttttttttttttttttgagatggagtctgtctctgtcaccaggctggagtgcagtggcaggatcccacctcactgcaacctctgactccccggttcaagtgattcttctgcctcagcctcctgagtagctaggattacaggcatatgccaccatgtccagctaatttttgtatttttagtagagccagggttt[132 bp omitted]acagtgatggaaatcagatcagcagttgcctgtggcagggtatggggaaatgattgcctatagtggggcacacgagggaacattccaggacgataaaaatgtcctatattttgataggactggtgattgcgtgggaacatacacttgctgatcctcatggaactatacaagataaagaaaatgcagaacagtccaggcacagaagacagaaatagctcagggtgtttgggaaccaccaggacatattgttgttactgagtgaggaggagcagtcagaggagaagctgggagtcagtggcacctgatctcacagggtcccatgtgctaatatcacaggcacacagggcagtcatggaaggaagttttgtttgttcgtttgttttgttttggtttggtttggtttttgagatggagtctggctctgtcgcccaagctggagtgcagtggcgcgataccagctcactgcagtctctgccccctgggttcaagcgattctcctgcctcggcctcctgagtagctgggattacaggcgtgcaccactatgctcagctgatttttgtatttttagtagagataggatttcaccatgttggccaggctggtcacgaactcctgaccttaagtgatccacccgcttcggcttcccaaagggctgggattacaggcatgagccaccttgcccagccttcctgcatattttcacatgtgcatgcacgtgttacttttgtttcaacataaatgagatcatgcaacctcttctgtgacttattttttcacttaatacctgtgtgagagattagacacttatattatttcccatttttcactcttacaaacaatgtgatgaacacaacatttgcctaggcattgtattagatgtattcctagacatgtaattaccatgtatatttaatgatattaaag[137 bp omitted]cccgtctctactaaaaatacaaaaattagccaggcgtggtggcgggcgcctgtaatttcagttacttgggaggctgagacaggaaaattgcttgaacccaagaggcggaggttgcagtgagccaagatcatgccattgcactccagcctgggtgacagagcgggacaccatctccaaaaagctatatatatattttttgatactgccaaattgtctcctaaaagttatattcccatagtctatgagaatacccacttccccagcatattgaatattgatattgaatgttaccagtgatttgaattattaccaatctaatggattttttaaatgtaatttcattttaatttcgttgtttactagtgaaactgaacatttgccacgattggccattttaatttctctgtgaactgtcagttcttactctttgctcatttttcagttggctcatgtgactttttcttgtcgatttattggtgttctttatgtatgatgtattaatcctcctgttctttagttgattaggttattgtgtctttttgtaatttttatttgtatttagcgcatatgggcaaacactattttgatgtgtctgataccacttgtgttctctgatcatttctgatctttgaccttgctgtcacctctgacccacgactgtcctccggtcttcactctccagagctttctggcttctgactcccctgacctccttggcttggcctccccccaggtttgtgaatggggcaggttactttgctgctgtggcagatgccatccttcgagctcaagaggagattttcatcacagactggtggtgagtgggaaaaggccccaacaacatggggcaggatagagcctggggcagatcagcattaggaggagaaggggggtgcagctggtggtctggggcttcgtttgcccctaatccactgccctgaatcccaggttgagtcctgaggtttacctgaagcgtccggcccattcagatgactggagactggacattatgctcaagaggaaggcggtgaggagagtggtcaggccgcagggggagggggttgcctgtgggtggaggttgattagcagggctgcagtgtgggagaattaggcagtctgaggcttcaggggagggaaaagtgtccatcctggcccagcacctgtcagacatcacctccgccctctccctctgccctaaggagaactgacaacttcctcttcatgctccctccacctggcagagacttccctcccagtatacataatactttattgtgttatctgggggtatacatgtctatctctctcactggactagttaatatcactgttccactacaaggcacagtacctgccatggagggggcatgtgtggtgttgatggacaggaagaaggatgcatggatgatgcagggtggctgggcaggtggatggatagaggacagaaagggtgatggatggaaggatatgagttggaaaggtggagggctaggagggtaggcaggtagatggatgaatgatagacggtacataaagggatgagtaaatgcttgggaagatggatggatggatgatgaagggtgggtggatagatgtgtggatgggtgagtgggtgagcacacagatgacatttagtctaagtctgtggcaagcagcaaagcagggcatatgtggcagagcctctaggatctccagacaagctggagggacacacgtggaaaaggtttgggagtgtggaaaggggctactctgggagaggcactaggatctgattccccaactcaccaccaggaggagggtgtccgtgtgtctattctgctgtttaaagaagtggaattggccttgggcatcaacagtggctatagcaagagggcgctgatgctgctgcaccccaacataaaggtgactctcggcctcagagaccctcccacatgacagcccttctccccacactgtcccagcccccagcgctcccgctccctgatggtctcatctttccatctttcctctctccctcccagtacctcctgttttccttcacctaaacccaccctcatgaaccctccatgcctgctccaggtgatgcgtcacccagaccaagtgacgttgtgggcccatcatgagaagctcctggtggtggaccaagtggtagcattcctggggggactggaccttgcctatggccgctgggatgacctgcactaccgactgactgaccttggagactcctctgaatcagctgcctcccaggtaatccccctgaggccttcctgagcacccccaaactcagataagctcaatcaacaccatttcccagctccagccttaccccctcagtcattccaggccctgccaacctcagggttcctcagactttctgggactccaagaacccactttgaaagtgctgtaactggccgggagccatggcttatgcctgtaatcccagcactttgggaggccaaggcgggtggatcacctgaggtctggagttcgagaccagcctgaccgacatggtgaaaccctgtctctactaaaaatgcaaaaaattagctgggcatggtggcagttgcctgtcattgaagctactcgggaggctgaggcaggagaatcacttgaacccaggag[136 bp omitted]ttcctctaaaagtgtcaaaggcaactggaggggagggctggggaatcagaccctctgtttcattcttcctctcggtctctctcactctttcagtgctcctctctttggccctggctctgtacagccccatgacttccccttgcccctggcttgggtgtgttccccctacagcctcccaccccgcgcccagactcaccagccaccccagacctctctcacaaccaattcttctggctgggcaaggactacagcaatcttatcaccaaggactgggtgcagctggaccggcctttcgaaggtgaagcctcccacccgccaaagccccagagagctgagagcagggtcagaagctggggctggtactgagagtgggatgagaggggtcaacggtggtacagccctccctctggcaggctctttctccctgccccaagtgtcccaaggagtccagccctgacatctcccctgactctcctgggaccccccagatttcattgacagggagacgacccctcggatgccatggcgggacgttggggtggtcgtccatggcctaccggcccgggaccttgcccggcacttcatccagcgctggaacttcaccaaggtgttcattccctccgataggggctggaggtagggagggagccagggcagattggcacctcctgctgactctgccatccctccacgtcagaccaccaaggccaagtacaagactcccacatacccctacctgcttcccaagtctaccagcacggccaatcagctccccttcacacttccaggagggcagtgcaccaccgtacaggtgaggccccccacttcagccagccctcccctttgtctccttcagcctaacaccccaacccactctccctggtgtgagagctgcccacactctcctttcctggggttaagaagcacatcacggccaggcacggtggctcacgcctataatcccagcactttggaaggccaaggcaggcggatcacaaggtccggagatcgagaccatcctggctaacatggtgaaaccccatctctactaaaaatacaaaaaattagccgggcgtggtggtgcgtacctgtagtcccagctactagggaggctaaggcaggagaatcgcttgaacccaggaggaggatgttgtagtgagctgagatcacgccactgcactccagcctgggcaaca[135 bp omitted]aaccctgtctctactaaaaatacaaaaaattagccgggagtggtggtgcgtacctgtagtcccagctacttaggaggctgaggcaggagaatggcgtgaacccaggaggaggagcttgcagtgagcggagatcatgccactgcactccagcctaggcaacagagcgagactctgtcttaaaaaagaaaagaaatgaagcacatcgcattcaccattccctaggtcttgcgatcagtggaccgctggtcagcagggactctggagaactccatcctcaatgcctacctgcacaccatcagggagagccagcacttcctctacattgaggtctgactgggaggaggtgggggagagcatggaaggggtgtcccaggagagagacctggggaatgagtggagtcagtcattgagggctggtggagcagaagcagacgcctggagcctgggaccaaggctggaggccgaggacagggccaggggccaggctgctgatgtctgtctctgattcttgccccagaatcagttcttcattagctgctcagatgggcggacggttctgaacaaggtgggcgatgagattgtggacagaatcctgaaggcccacaagtaaggtggactgtcaggaaggtggggactgtgggtgtggtttgagcccggttgaagggggtggggtttgagggaccagtcgcacctctgactccaccccctccccagacaggggtggtgttaccgagtctacgtgcttttgcccttactccctggcttcgagggtgacatctccacgggcggtggcaactccatccaggccattctgcactttacttacaggtgaccccccaggcggactccagctctcagtggccccatcccacccgtgtccccctcctgattctgtcctgatcccttcctgctgggccttaaagaagggccacctctcctgacctcccctcccctctgccagcctccacttctctccctctttcttttctctcaggaccctgtgtcgtggggagtattcaatcctgcatcgccttaaagcagccagtgagtgctgggggctgggggctcaagccctgggcccctgggagagggagattggggcgctgcaggcctgggggtgggggaaggaggctgtcactcctgtgagcctctgacgctacgcagaccatagctggcctttcactgcagggagaaggagagagaccagactctatgtaggaagagtttctggagtgagaggaggtgggacagggccctgtgcacacagagccacctctcacctcacttcccctcctgtcacgcagtggggacagcatggcgggactatatttccatctgcgggcttcgtacacacggagagctgggcgggcaccccgtctcggagctcatctacatccacagcaaggtgctcatcgcagatgaccggacagtcatcattggtcagtgccggatctagtcctctggcagggagagggtgtggggacaggcgaagagatgagaggcaggatgacagagactgcagctgaggctcgtgtaggggtggagggtccaagaaggaatgttgcaggccagtgctttggtagaggggatggggtactggggagagtgccctgggcccaagcacacagtgtgccccgcatccaccccaggttctgcaaacatcaatgaccggagcttgctggggaagcgggacagtgagctggccgtgctgatcgaggacacagagacggaaccatccctcatgaatggggcagagtatcaggcgggcaggtttgccttgagtctgcggaagcactgcttcgggtagagctggggcgggatgccacagggtgggagggagatgggggcgtctgccttttgagcaggacaagaggtagcaccgcataggtactcccggagccagaggtagaggcagtactagattctcaataggcaaggctgggcgcggcagctcacgcctctaatcccagcactttgggaggccaaggcgggtggattgcctgaggtcaggattttgagaccagcctggctaacatagtgaaacccgtctctactaaaaatacaaaaaatcagctgggtgtggtggcgggcgcctgtgatcccagctactaggactaatcagtttagagtatcagtaaagcaggaacaccaaaaaacaaaaagagaaaaaaatcttttttttttgagacggagttttgctcttgttgcccaggctggagtgcaatggcgagatctcagctcactgcaacctctgccctgggttcaagcgattctcctgcctcagcctcccgagtagctgggattacaggcatgcgccaccacgcccagctaattttgtatttttagtagagatggggtttcgccgtgttggt[131 bp omitted]ttgagacacggtttcactcttgtcgcccaggctggagtgcaatggcacgatcctggctcactgcaacctccgcctcctgggttcaagcaattcttctgcctcagcctccggagtagctgggattacaggcgcccaccaccacgcccagctaatttttgtatttttagtagagacagggtttcgctgtgttggccaggctgatcttgaactcctgacctcaggcttcggcctcccaaagtgctgggattacaggcatgaaccaccgcccctggccaaa[268 bp omitted]cgcctcccaaagtgctgggattacaggcatgagccaccacgcccggccaaaaaaaaaaaacttttgtgttttgtttgtttgtttgttttctttttgagacggagtcgctctgtcacccacgctggagtgcagtggcgcgatctcggctcactgcaagctccgcctcccgggttcataccattctcctgcctcagcctcccgagtagctgggattacaggcgcccgccac[138 bp omitted]cccggccaaaaaaaaaatcttttaaaagtaatttttttcacaggttctgaggattggggaaagaacagaaaaagaagaaaatttaaaataaaaataattttttaaagcatcaaggtagtcatcaaagtcaagacaaatcagaactctgttggcttcttttacacttattttactattttatattgcatttattttgtttttgtttgtttgtttgttttgagatagggtcttgctctgtcacccagctagagttcagtggcgttaccacggctcactgcaacctcgacttcgccagctgaagtgatcctcccacttcagcctcccaagtagctgggactataggcacatgccaccgtgcctggctaatttttgtatttttttgtagagatggggttttgccatattgcccaggctggtcttgaattcctgagctcaagcaatccacctgcctcatcctcccaaagtgctgggaatacaggcgtgagccaccgcacccagccaattttgaattacctgagtagggacaatgtaacttttctggtactcaggttctctaaggatcttaatctggccctgctgggacccctttctcctatagtgtgattcttggagcaaatacccggccagacttggatctccgagaccccatctgtgatgacttcttccagttgtggcaagacatggctgagagcaacgccaatatctatgagcaggtgggaacttgggaggggtgggggagagtggcctggggaaatttgtggattatcctgctcagggtaggatggagagaagcgccaccatacagtcattattggaagggggatgagggcctggggacatttgctatcaagagatttagtggcccaggccgggtgcagtggctcatgcctgtaatcccagcactttgggaggccaaggcccggtggatcacctgaggtcaggagtttgagatcagcctcccaacatggcaaaaccccatctctactaaaaatacaaaaaaattagctaggtgtggctgggaggctgaggcaggagaatctcttgaactcaggagacagagatttcagtgagccgagatcacgccattgcactccagccacctgggcaacaagagcaaaactctgtctcaaaaaaaaaaagtacaaaagttagccgggcatggtggtgggcacctgtaatcccagctactcaggaggcagaggcaggagaatcacttgaacccgagaggtggagattgtagtgagccgagatcgcaccattgcactccagcctgggcaaaaagagtgaaactccgtctcaaaaaaaaaaagagagagagagttagtggcccagggtcaacggggggtatggagagatggtatgggggaaggggtctagcctagttggacttagattgttgggagagtctccccaagccttactggcgtccatgcccccgcccacagatcttccgctgcctgccatccaatgccacgcgttccctgcggactctccgggagtacgtggccgtggagcccttggccacggtcagtccccccttggctcggtctgagctcacccaggtccagggccacctggtccacttccccctcaagttcctagaggatgagtctttgctgcccccgctgggtagcaaggagggcatgatccccctagaagtgtggacatagttgaggcccccgtcagggagaggtcaccagctgctgtgccccaccacgtctggctccctgccccttaaccccaaggactgagggcagtgccctttgagatctggggaggcaggcattcctgaagggaactagaggtgttacagaggacccttacgtgagaaatagctgaaaagggcactcccaaccctgggctggggaggaggagagagtcccagagctcatcccccctgctgcccagtgcaaaccacttctccatgctgcaaaggagaagcacagctcctgccagggtgagcagggtcaagcctcttattccaggagaagggggctctgccccaggccctactacccattgttcccttcctcttcctgcccttgaaccccctccctgtcccagggccctcccagcccattgctgccaaggtggagggaaggataaagccacttctggcttcagcccccaccaggggaaggaaggagggcacattaactccctccaccagcctgctgacagacactaactttgtatccgttcaataagcatttcataaataaaggtgtagaaaaggttcatgcgtcttccttggaggaactaactgctcgttccagcctcccgttcctgcccacacggggcaccagtccccttcaccttatctccaccctcctccactctcctctctccacctctgttctacctatctgtggcttcgggagctcggtcacctggctcctgagaggagaaggtgttgacacagtgccgcctgggtagaaggacgggcagggcccaaccagggcacctggagaactgtggagctgctatcacaaccgcaggtgagggagatgctctgagaaggacctagagaggctgcctcttgttcaagcaacagccctggtagaggcttaatgaaggccctgtgggagtggttgagggtataggcttaaggtcaggaagacctggacccaaatcctggactcctcaatgagaagctaggtgaacttgtcaagtcattcacttctctgggcctcagtggtccccgctgggaaatgggaataatacttacatgactagcttgctgtcaagactcagccattgacttaaatatttattgattccctgctatttgccagctctgttctagactcacagaagtgagtgcaacaaagtcctcacccgtatggcacttctgttctggagcctcactgtccagtacagtagccactagccactagccatgtttggctatttctttttctatttattattattattattttttttttgagacggagtcttctctgtcacccaggctggagtgcagtggcatgatctcagctcactgcaacctccacttcccaggttcaagcgattctcctgcctcagcctcctgagtagctgggactacaggtgtgtgccaccacgcccggctaatttttttttttttgagacagagtcttgctctgtcgtccaggctggagtgcagtggcgtgatctcagctcactgcaacctccacctcctgggctcaagcaattctcctgcctcagcctcctgaacagctgggattacaggcgcccgccaccacgcctggctaatttgtatattttttagttggccaggctggtctcgaactcctgacctcatcatccacccacctcagcctcccaaagtgctgggactacaggcatgagccactgcacccagactaatttttgtatttttagtagagacagg[253 bp omitted]atggtgaaaccctgtctctacaaaaataaaaaaattagccgggtatgatggcgggtgcctgtaatcccagctactcaggaggctgaggcatgagaatcgcttgaatccaagaggcagaacttgcagtgagccgagattgcaccactgcactccagcctgggcgacagagcaagcaaggctttgtctcaaaaaaaaaaaaaaaaaaatttagtcccttacactagctacatttcaagtgctcagtagccaattgttgccagtaactaacatattggacagtgcaagtatagaccatttccatcactgcacagagttctactggacagccctcttcccagagggaagaggtggaaaatatggcaaggtctatggaagcgtattgcacataccaaactgggaatggttaccttccagaagaggtatacagagagaatgtcactggtaacaatggtaaatttttttgacggggaggggcagacagagtcttgttctgtcccccaggctggagtgcaatggcacaatcatagctcattgcaatgttgaactcctggactcaagagatcctcctgcctcagcctcctgaatagatgggactacaagcatgtgccaccacacctggctaatgtttttattttttgtagagatggggtcttgctctgttgcccaagctggtcttgagctcctgggcttaagtcatcttcccacctcagcctcctaaagtgctgagattacaggcataaatagcacctggccctttttatttcttttctttttttctttttttttttttttgagatggagtcttgctctgttgcccaggctggagtgcagtggcacaatctcagctcactgcaccctccgcctcccaggttcaagcaattctcctgtctcagcttcctgagtagctgggactacaggcgtccactaccacgtttgactaatttttttatatttttagtagagacggagtttca[132 bp omitted]aaagctgggcatggtggctaaagcctgtaatcccagctattcaggaggctgaggcaggaggaccaagagttcaagctcagcctgggcaacatagcaagaccccatctctaaaaatttcttaattaaaaaaatataaacacacatattcataactttttgtatgtctgaaattttttatttttgttcctttttattttttagagacaggtcctgctttgtggcccaggctagagtgcagtggtgcgatcacagctctctgcagctttgatttcctgggctcaagcaatccacctcagcctccagagtagctgggactacaggtgcatgccatggtgcccagcttatttattttttcatttttgagacaggctctcagtctgttgctaaggctggagtgcagtgcagtgggtaatcatggctcactgcagcctggacctcctgggctcaatcaatccttccgcctcagcctcctgagtagctgggattacaggcaggcgccaccatgcctggctaatttttgcataatttagtagagacggggtttcactgtgttggccaggctggtctcaaactcctgacctcatgatccgccctcctcggcctcccaaagtgc[131 bp omitted]aacctacgcctcccgggttcaagtgattctcctgcctcagcctcccaagtagctgggattagaggcatgtgccaccacgctcggctaattttatattttttagtagagacggggtttctccatgttggtcaggctggtctcgaactcccgacctcaagtgatccgcctgcctcggcctcccaaagtactgggattacaggtgtgagccaccgcacccggac[132 bp omitted]aaaccccctctctactaaaaatacaaaaacagccgggcacggtggtgggcgcctgtagtcccagctactggggaagctgaggcaggagaatcgcttgaacccgggaggtgaaggttgcagtgagctgagattgcgccattgtactccagcctgggcgacagagcgagactccatctcaaaaaaaaaagaaagaaagaaagaaaaaaatgtagcacaagtcctggctcttgcccttcattcccacagcctcacgccccagtctcagaactgaccgcagatgcaggaggaaactgaggggggtgaagtatggagattaggaagccctcctggaagagagatgtgctgggtgggtgaggcatgaagaggggatgatgttgctctgcctcatcctctccttcgagttcagccctcagtcctcacaagaagctaaagaagctacttctgtgccagaattcccccctcctacatatagcggtctcctggtactaattggcatcctgttaattagcctcattgtcagcactaactgcctgtttccccgagggggaccattacctcattcaccgtggagtgagatagaggcagcggttgccccaggctgggccaggggtgccgagggcttctgcttcacactctctgccttcgcctccctagtcctggaggtttttgtttgttttcggttttttttgagatggagtcttgctctgtcacccaggctggagtgcagtggcacaatcttggctcactgcaacctccacctcccgggttcaagcaattctcctgcctcagcctcccgagtagctgggattacaggccccctgcaccgtgcctggctaatttttgtacttttagtagacacggggtttcaccatgttggccaggctggcctggaactcctgatctcgtgatccacccgccttagcctcccaaagtgctgggattgcaggcatgagccactgtgcccagcctagtcctggagttttttaaatggagaccaaccatagtgagggggggtgggcggtggaagcagagggcttagaatcagaagagttggctctaaacccagaatggaaaaaggagcctctatgactgaggcattagtaaatttattgaggacctagtatatgctaagtgctttacataaattattttatcctaacctccctattattatcatctccattttacagatgacagagttgagcctcagagaggttagtgatttgcctaacgcactacctccaaattctatgctttttcctactatcccatggtcttgactttgaactgctacagtgcccacccagacaacagatgccttcattacttttttttttttttttttggggatggagtctcgctctgtcgcccgggctggagtgcagtggcatgatcacagctcactgcaacctccgcctcccgggttcaagcaattcccctgcctcagcctcccacctagccgggattacaggtgcacaccaccacgcccagctaatttttgtatttttcatagagacaggttttcaccatattggtcaggctggtctcgaacccctgacctcaggtgatccacccgcctcagcctcccaaagtgctgggattacaggcatgggccacggtgcctggccaccttcattgcttaagtgttagtgattttctttcttttgttttttttttaagcgttattgattttctagtgggtgccaggccatgtgctgaacaagactaatattattcctgcttttaaggagattcaaaagacatttacaattcaaatcattaaatgttaccatggactaaagccaggcagctaaaacagaagaaccaaacttagtcttggtgagtcaaggaacgcttcatggaggaggtgatttagacacgtaggacaaagcaaagcacggtaagaatgggcatggtcaagaggctagggaatattccaaagagaaaacagagtacatgcaaaggttgggggagagaaagttgagttctgggaagtgagtagagtatttcagtatggctggaaaatgtgaggtctaatagttgagtattgaaaagtaaggcaggcactgagcagggtggttcatgcctataatcccagcaactcaagagcctgaggcaggattaacacttgagcccaggagttggaggctgccgtaagccatgatcgtgccactacactctagcctgggtgatagagcaagaccccaactcctaaagaagcaaaccgttaacaaagaaaaagaaggcaagaaaagccagcagaatcttgaagggtctttgatgccacactttgccttttttttttttttttttttttttttttttatgagacagagtctcacgctgtcacccaggcgggagtgcagtggtgcaatctcagctcactgcaacctctgcctcctgggttcaagcaatcctcttgcctcagcctcccaagtagctgggattataggcacaccccaccacgcccggctaattttttgtatttttagtagagacggcatttcaccatgttggccaggctggtctcgaactcccaatctcaggtgatccacctgcctcagcctcccaaagtgcggggattacaggtgtgagccaccatgcccagccaatctggtttttgttttgttttgagatggagtttcgctcttgttgcccaagctggagtgcaatggcatgatctcggctcaccacaacctccgcctcccagattcaagagattctcctgccccggcctcctaagtagctgggattacaggcatgcgccaccacacacggccaattttgtatttttagtagagacggggtttctcc[185 bp omitted]tgggattgcaggcatgagccaccacgcccggccaattttttttttttttttttttgagacggagtcttgctctgtcgcccaggctggagtgcagtggcacgacctcggctcactgcaagctccgcctccggggttcacaccattctcctgcctcagcctccggagtagctgggactacaggcgcccaccaccacgcccggctaatttttttttgtatttttggtagagacggggtttcaccg[136 bp omitted]tcacccaggctggagtgcagtggcacgttctcggctcactgcaacctctgcctcccgggttcaagcgattcttctgcatcggcatcccgaatagctgggattacaggcgcctgccaccatgcccggctaatttttgtatttttagtagagacatggtttcaccatgttgtccaggctggtctcaaactcctgacctcaggtgatccactcgtctcggcctccccaaaagtgctgggattacaggcgtgagccactgcacccggctttttttttttttttttttttgagacgttgtcttgctctgtcacccaggctggagtgcagtggcacgttctcggctcactgcaacctctgcctcccgggttcaagcgattcttctgcatcggcatcccgaatagctgggattacaggcgcctgccaccatgcccggctaatttttgtatttttagtagagacatggtttcaccatgttgtccaggctggtctcaaactcctgacctcaggtgatccactcgtctcggcctccccaaaagtgctgggattacaggcgcaagccaccgtgcccggccaattttttgtatttttaatagagacagagtttcactatgtctgcgaggcttggccggttgtggtggttcacgcctgtaatccctgcactttgggaggccaatgcaggtggatcacctgagaccaggagttcgagaccagcctggccaacatgatgaaaccccgtctcaactgaaaatacaaaaaattagctacgcgtggtggcgtgcacctgtaatcccagctactcaggaggctgagataggagaattgcttgaacccgggaggcggaggttgcagtgagccaagattgtgccactgcactccagcctgggcaacgagaacaaaactctgtctccaccaaggtgacattttccaccctgtgtcctgttccccaataaaaacaaattcacaaattcacaaaaaaactaaactaaactaaaactgtctaaaaaaaaaaaaaaaaaaaaaaaaacaaacaaaaaaccccaccatgttggccaggctggcctccaactcctgtcctcaagggatcctgtaatctccgcattttgggaggccgaggcaggcagatcacttgaggccaggggtttgagaccagattgggcgacatggcaaagccccatctctacaaaacatataaaaatcagccaggtgtagtggcatgcgctgcctgtagtcctggctacttgggaggctgaggttggaggatagcttgagcccagaagcttgaggttgcagtgagcagagatcataccattgtactccagcctgggtgacagag[138 bp omitted]cccgtctccactaaaaatacaaaaaattagccgggcgaggtggcgggcgcctgtagtcccagctactcaggaggctgaggcaggagaatggcatgaacccggaaagcggagc[138 bp omitted]gggatagcggcttgaataagggcagtggcaaggaaaatgggctaggggttagggaagggggccgactggctgtgcacccaaatgctaaaaacggtccagaaaggaatgtgttcagctatttttcaaggacttctaaattaaactctcttaaatgatgtttatattaaggctggtggtggagtctttcagaggcagtgttggtgctagaagagctcttgaggatcatacagcctcccccctcaatttcacagtgaaagaaaacctcagagaagcaaagcaacttgctcaaggtcacacagcatttcagtggtagaacatgactcgtggttcttagatagcattacccagcctccactgaggctaatggctgtaggcgctatgccaacatgactagatctaaggtgacccaagctatattttaagggactgaacgcagattccctctcttccccttcgccaccccttcctccacgcgcgactccagtgatcaatgaataattgtggaaacagttcctttgtgcagaacactttgttaaaagaggtgcagagatacacgtctgcggtaggattccttatcctgagatctgagagcacctcgatgcttccccaacctgctaggtgagggtggaaagggcattcctgaggcagccggtgcccctcctctgccccccaactcccacgtggtttctccagccaagttctcacggagtggcccctccctcagcggctccactgttgccatagcaattgggtgggtggacagcccgtcctatctagaggccacccagccctcgcgtggggagttaccataacaaccccctagtaatagagggggttgggtaccgcccccttcccccgcaaatggaaaggtgggtggcttgattggcagctgggcacacgaaagaaggagggaaagggaaggaaaggcgtcaaaggagatctgagaaggaaataagggagagaaagggcaaaaaaaatagggaaagaaaaggaaacgcgtgtgcgcacgcgcaccagctggtgggcgcgctccgcggccgcctcggccgccgcccacttctttcacgccaggctcgcgcggtcgctccgtcctcgcgcgcgcctttcgcctgctcgcctgcgcctgcgcgcaggtgtcggcgcctagggggagggggccccggcgcgctcgcgtcacgctcgcgcttccaccctcccagtgcgcggtcgctccgcgcctgcgcaggagaggtggtaggctcgggtggctggctccggggagatagcgcctgtcagtcggtgggtcggtcctcgcgccggccctccccctccccggtctccgggggaggcgcggtggagtccgcccccggggttctccgatgggggagaagcggcgacggcggcagtggagtaaccgagccggagcgtgagcggccccggtgccccgttccccacggaggccatgggcgacccagcccccgcccgcagcctggacgacatcgacctgtccgccctgcgggtgagcgcgccgtcccccagcctcgccctggttcctgtccccgccgcaggggagggagcggggtggctgcacgcctcacgtgctcccgggcgccccctccaccagcttgggtccccttggcgacccgtgcccctttcccggactcccgccgcggctgggcccccgccctctgctcccttctctctccactggctgcagatgctgggagccagttcggtccccaccctgtggtgccccgcccccacacttccgtgccaccctacctttactctggggttcgggacccactggttcgcctaaacttagcctcccccatcacctggagaacctttattgtggttccttacctcctttcggcccttttccacctttgcccttacttctatcttcttccttcccctcctcttcctcagctcctggaattttgactttgcaactgtctcgacagcctctctctcatccctctttctctgcctcgcccacccttgaattgcatcctttccctggtcggaatttcagctaccccacccctcgtgccgtcaccctcaatcccatgttcagttttccctatcccttctctcctgtttcaagtgcagcagttcagaaccaggcatttccggtctcagggtccctgaatattacatgaccaactctgcagcagcgtggggctgggagccctcggggaggaggggaggcatttcttctctttggaaactgtagcacgggctgggaagaggatgtttacacacacacacacgcgcacacacgacacatgctacatgtggtcaggctgaaggtttggaaaggcagtgggtgtttatgttagctaaaggctggaagcaatggagacctctcaaggtaggggctaataaggaaaggggttgagaggaagcaaatgctgcaggaatttcttggaaatacccgttcattgtcccttgtggggcacttacacactctggtggaagagctttctgtagcatttatgtttttcttcggcagggagctttggcttaaggggcaacttagtgatttcaaggtgaacactccagactatcagccaggtggtgttttgatcctgtgcccttccagcgctctcaccaggccaaggtgtggggagagcaggacttcccatctctaggttcgcttctctggaggcccctgctcagactgtcttctggcttttgagtcagccagggaacatggccagtagtgggaaaaggcggtcagccacacaggtgccccggatatggctggaggggagaggggaattgaagagagcagagtcatgttgttaattgggtttctctaggtgacacagttttttttcttcccattttcaggtcataatttgtttggtgcaatgttgggctatgagacctgacttgctggagataacgtgataaatttctggggagagggactgaacgctgaatttctctgtgtgcgcaggcacatgtgtgtgtgttgatgaggagagggtctgaaggctttaggagggagattcttaaggtcagcttggccagggtttaaactgggatgcccaagtcgggatataagatggaaatccagattctgagtaaaagtcccttaatgtgctccattctgggatgaacttccacctttccttcctaccttggttattgattaactggctacaggttcctgtggctggggtg[131 bp omitted]gaaaccccatccttactaaaaatacaaaaattagccacacgtggtggcacacacctgtgatcccagctactcaggaggctgaggcaggagaactgcttgaactggggaggtggaggttgcagtgagccaagattgcaccactgcactccagcttgggcgacaaagcgagaccttgtcttaaacaaaacaaaacaaaacaaaaaaacggggcgggtccaaaccacaacctttgctttgaaccttgtgggactctgcttgggtttctcttttagcctcttttggtagtttggcctggaccctcaacctgggatttccagcaattccacaaataccctctgaccttagatgtggtatttcccttctggacttctcggcttgaagcaatgttagccttcctcagttgcctccagccttactctcctctcccctcaggagaccgggtgacctgctcccagtgcttctgtctggcctgccttaagctgcttaagaaagcattctgcttccccctttccaccctaaaatgcaagggcttgagggagggctgtacctcctttgacatggggctagccagggcctaccttctccctgctgcagaccttttctcagtgcctgtccccctgactccacctcagagagctgtggcactgtcaagcagctagtgtggtcatctcttgtgctattcctgtctgttttccagtgagaaatggtgtctccctttactacaccatcttgtgttgggggctggggagagggatgggagaggaacatattcagtatttatttgctggccttaaggagcccaaggtgtatttctcctcttgtttcaagataaggcttggttttcagctggtgatgagggtaatcgtctgatattagggaagattgaattgcgttaatctcttagccatgtgtggggaggccagatggacctgctactttgtagccacagccacacttgacctctttgaggttccttttctccaccagcctggctgcagcgtggtgaggaaaagcatgtggtttgaagttgcagccctgagttcaagtcctagtttcttcccttacaatgtaaccctggccctgctccccttactgcagattctgccaagagccttaccctctctaagcttcattcagtcctgtatcgtgggcatggtaatagtactgaatgcagagttgctgaggattaaatgcacgttaagtacatagtacagttcccagcacacagtgatcatatatgtgatagccctttttgcagttatttttatcaaatggcaatcagagaagccttccaggacaactttatctaaaatagcactccctcctctgctttatttttatacaaaattttatatagcattcccttagtctgctttatccttcctcatagtatttatcaccagctgacatatatattcctgtcagccccactaaaatgtcagttcagtggccgggtgtggtagctcacgaccgtaatcccagcactttgggaggccgaggcagatggatcacctgagaggtcagaagttcgagaccagcctggccaacatggtaaaaccccatctctactaaaaaaaaaatacaaaaaaattagccaggcatggtggcgcacacctgtaatcccagttactcgggaggctgaggcaggagaatcacttgaaccttggaggtggaggctgcagtgagccaagattgcaccactgcactccagcttgggcgacaaagccagactctgtttcaaacaacaacaacaactacaacaaacagttcggtgaaagctaagattttggctgttttgttcatttttgtatccccagtgcctgtaagcatgttttgcacataatgggggctcaaacgtttgttgcagaagtgcctcttacaacacgtgccacttacaacacagtgcagtgcttgcttagagaaagtattcaataaaccccaggcttcttaggcttcattttgcccctcttttatttatgcacaattaagaatatattttttctgggatgtttttagaatcagaccttgtctggggtaaacagttctggaagcctccagctgagcgatgcccttgaagtaaagttaggatcatccaagagaaaatgtgggcctctgtgtctaagcttggttatattccaggagaaccttctgacttggaactcttggcttctcacaaaggataaatatcagtggaagtggatgggacaaggagggggcaggccccggcctgacctctttccttttgcattgctccttttggttgacccacttcgtaaatcaaacagcttctttttaccatccagctcgaagtttgactgcagtgtccttgaaactgtggagctatgcttagcgtcgctggattgaaatcatagcatggagcacattcaaggaggacttgttgctcggtggtagctgctgacagagatgttctttttcaaatgattttgtgttgttgtgtctgttctttggataagtgtcttcgccttcctcctctcttcatgcggctgtggagccagcaccactcggaaagctggcagttctgggcatgtatttctaggctgctgagcaacgtgggactgcctctgtgttctgatgtgctagctgtccaaatgttgatgacagatgccttaggcaggagaatgggaagagtgacctcctgctgcagaagtaaggacattcaatagtgacttttttcccctggaaaattgcaaaaggggaatggggctgtttggagagctcgaggcatttagatgaagtgaaatgctgccttggcaaaatgacggaaggaagattactgagaacttggctgaaactaggtgatcagtcattccccaaacagagggagagacatccccaccctttatgctatgggataggacagtttgccatagtccttagggatatacacagcagggaggttttgacagttaagataacagtaaggtcagcaagagagccagctggcccaccccctcactcttgccccaggagctcaattaaaactctgctgggtagaatcctgacttcacatctggcctccattcctttccgcattgaactgtgtgcctaagacagggtagcacacacaacttgcacatgtaaaccatctttgtttgtcatttaggggacatgatggcaggaagtgtgcagccgctcttgataagcttgtattctggtgtaggtctgtagataaggcatgcagtaacctctcaacccagaaacataaagcaattctggactggagaacatctccagaagccggtgagagtctgcctgtctaatatttctgtctccagacaaagttgaatcagagaaagttatcaataatcccctgtcctccaccagtcagtcgccaagcattggcagtctatgtattgagaatcaggttccagattctatggaaaggatgtaatatagtactcagtcctctactaagctatttaaccagatctctggggacatccacccaagcaaagcaat[267 bp omitted]agcctcccaaagtgctgggattacaggcgcgagccaccgtgcccggcctagactctttttcttaactgttactgttttcctcaatatcctgcaaccttcaaggttgggacatttttgttaaacctgatttccatgaattacactcattttctgtggtcagtgggcagtcatcttgaaacctggtcttcagccccactcccttcgacacctactttttactactatctgtctcagtcttctctttcctggattgaagacagaacaaaagtgatcaggttaataagtcaactctcaaagcatttcttgaattcacacagagtatagtaagatacaaaaacgtgacttggtagaagacttggatcctgtccacagctcacggccatttgctctctccagttcttttgccattctcctccgaaccaaccagtccttgacttgagactgggcttctcttatctataggaagctcttctagggggtaatggaaaaagggttttgaggctctttgttcttactaagggcgggaatagtaaagggaggagagaaaagagggatggaattgtagtgacccaagagagcccctggagattttgtccagtggctagacagcctgaggttgtacgtgctacgtgtgggtaggattttgtgttctgtttgaggaaagatctagaactaggcacagaggacacagtggtgatacagtctagtagtagggagagacattaatcaagtaattatttattaatgtgtgtgtgtgtgtgtgtgtgtgtgtgtgtgtgtgtgtgtgtgtgattgcaagccatgataaggactgtagtgaaaactttaacatgccgtgggcacatataacaagagttgttttgagcatatgttctcaggatctcctgagggctgtgtcatggaaaaaaaattgcttttacgagacaaaacttttataagacaaaaatatctagttgattgagagagacgtaaatcatgtcagaaagctaaactggcattgctgcagaaagatgagatagagttgaaccagcaggtagagtttggtgatggtgagaattgggagactctggaatggggccattcttatggtgaagcatttggtcaacaattgagggcaagaagcctgaggatggggtggaaactccaggcttaattccaaaaggatttcttctgaatcttcctgtgggaggggaaaaaaaatggtttatttgtttgtctcaaaagttaagagcatgtatatggaaagagcttatgactcatataatcctcatttttacttactgggggagggactctgggtcctgggtctgtagtttagatgtggctcctcagaatggggtatatgagagaggagggtgtatccctagatgttattagcctaaggggtgcctggagtttggaaggtaggtgagtctcacggaaataagaacaagtaggcccagccctcagcttagctgcatggtctgtgggaagtgggattctttctaacattggatagatagtgtatataaatagacaagactctccatttacattgtatacaagtaaaggatgagtggggtgtggagggggagtgttactgattttgcgtgtttgaaaggaaacagggttggggaagccacaagtcttgggcttcctgaaggagccaggctctgggaccagcttgaatgtcgggaggatggcagcgtagaagacggtgaggtgggctgtgaggagagtttggtggcacagcctgtgggaggagcctgggtggctggagagagatgaatggaggaaatggggacgagctgcctaagaaacgtggtgatagttggcgagggaggagacaggaagacctttgacagaggagatagctgagacctcaggttcatccacagcaggtaaattccagggccacacgggacaggcgacgtggggagtgtctgtggtcacaactgggggccccagcacttagagcctgtgactcagtatgtacacgtagcaccaaatgctttttggttctgtcttgggcatctccgcacgggcacttccgccagtggtttcttccattgcctttgggatgagcaggcctcctgaaagcaggcctgatattctctggtcttctgacaaagaatgggaaatttctcacaccgtcttgttccaggaaccacctggggatgggatttgaagggcttgggttgccgaattgctcctagaaccacaggcttagaggagttttctatgaacagcggtcctggcagggacagactgaggatcggtagggctgaatgaagacaatcccacctccttcaagagccacctcaacttatgtttttttcccacaaagccccccctccgattttgccagcctttactgatcacatcatccactttctcacagaccttacaatttagcattggcttatatattgccttatattgaataatgttttatggtcttgtttttcctaccacttccttatgtgtagagactgtgatccatatttcctcttgatccctgtaaagatgctgagcacacagtaggggttcagaaattacttggtaagagacatggatctaagtatgtctgtgactggacctttcctactagattcaatccacaattagtacagggtgcccagtatatgctgggcacggtgggatacaaagcagtacaggtgctgactctggttctcagccagggcaccgctggcctccagggggt[225 bp omitted]tgaggc[142 bp omitted]gggattggggatgttaaccatctggcagagtctgggacagtgcatcgaagaactgtttttccacccgtattgccactggtacctctcatgaacttgttatggacatgggagagacccggggagggactggacaggtttcttccatgaagtaggaagtagttcctaagtcccctgtgtacttctttccaggtagagagaggaatgtgggctctaaattacccttgtgcatggcacatatctagcagcttttgtctgctagcatacctctggaggtaaaataggtaggctcccagccagactgtaaggaagattttcatgttctcttttcaccacccacccactctttctttcaaggcacatttttaagaaagtggctgaagcttgcaatacttagtctttagttctaagtgactcaggaaagagtcttcaagaaaacagttggacagagtgccccaaagcctaagcagcgtgaggcaaagataggcaggtgcatgtggcgtcttagagaggggccagcacatcgtctcttctctggggtcttttcatcctacacttgtctttttgaagacagaggtgtggtgaatgaatgtcattacttacatctgggggagtgaccagagacagtagaagacaccttgccctagtgtatcctttcagggtggaccagtggctgggaagcagcacagctgagcgggatgagctggagctgtgcagagctgccttccacagctcgctgtttcccagtcccagtcaagagagcagaacttggtaggctcctggccttgggtagctaaggtttggaggaggtggagagagtccgcctaaccttaacaaggtcattcctcacagtggaaactacctgagccccacgtgtcgaagcagggtagggggaacaggcaggatgtggatcagaagttggtttgggctgggcgcagtggctcatgcctgtaatcccagcactttgggaggctgaggcaggcagattacttgaggtcaggagttcgagaccagcctggccaacatagtgaaaccctgtctctactaaaaatacaaaaaattagccaggcatggtgggaggcacctgtaatcccagctactggggagggtgaggcaggagaatcgcttgaactcaggaggcggaggttgcagtgagcctagattgcgtcactgcactccagcctgggcgacagaacgagactccgtcacaaaaaaaaaagaaagaaaaagaaaaagaaaaaaaaggaagttggttggttctagtaagtcctttttctgtctgtcttctgtttggaacaaagattgctgtgataaagtcatttatattatgatgcagattcatttcagaagggggtgtttggggttggaataagaaccgtaatgaacacttactgtgcagtaggttctttccttctgtaatctcattgtccctcacaagaaccctttgaggtggacaatattatcctcatttgcaagatgaagaaaccaaagcttacagaaattaacttggaagttaagtaacttgcctgaggttggacagccagtaagcagcagagcccacattcagactcaagtctgactccaaaacctgggctgccatgctgttggagggagacctgctcccacgtggcggtgggtatttgggggtgggcactgaggggaggacaggagggcagtgtgtagctggcactctagactacatgcaactggtattgttttctgcctgttttttggtttctttttgctttttttgagatgaactcttgctctgttgcccaggctgaagtacagtggtgcgatctaggctcactgcaacctccacctcccaggttcaagatcctcctgtctcagcctcccgagtagctgggattacaggtgcgcaccaccacacctggctaatttttgtatttttagtagagacagggtttcaccatgttggtcaggctggtctcgaactcctgacctcaggtgatccacccacctcggcctcccaaagtgctgggattacaaatgtgagccaccgtgcccggcctgcctgttttaattgtaaatgtgtgatatttctgtgacttatggtaaacaggctttgtgggcttactgaggactaaaacattatccataacgtttcttggtaaagtttttggagacttttggaatatggcctgtttcatgggctggagacagtctgtatgagagatagttactgccctccaggagcacttggcctctagatctgtgtcttaatagaggacaccttttattcgtatacctgggtctttttgaggtggggagagtgagtgacctcagcctgagctgaacaggtggtgggttggcactggggagcacatgttgggaatacagagctccacggggctcgtacccagaactaatagagatttctaaatgtagggccgctgggtagatcactgtgatgatgaagaggacatgcagaagacttcagaatatttggtctgcaggaaagatagtcgaataattcaaaagaaagcctcttcagagggaggagaggaaggctgtctcatttccccccaccctttaaaaatgtgttgttgttgttttttaatgtgattaagtatatgtaagacttaccattataaccatttttcagcgtacacttctgtggcattaagtgcattcacattgttgtgcaactgtaaccactatccatctccagaacttcttcatcctccccaaatgaagctctgtacccattaaacactgactctctgaaccctccaccttccagcccctggcacccaccattctgcatctcattgtcttttgtgtgtgcagagttgagcagagggtctgaccgagcagatgtttaatatttgttgagtccgcctaggtgcatgtctcagaagtccatgtatcatcagccaacccagaacacaacccccctcccagctctaatgcaagatgacaggcttctgaaagggattttaaatgaaatggctgtctggaatcacaagaggattgggcagcagcaagagaagttaagggtttctgttccgtattcagttccttttgccaccccccagccatgacttgcgttctggttctgctatgctcatgttcgtcatcttgcttgttttcagcctcttacttcatctcatcctgggggtctgatgggtaggtgctagaggaagttggaaataaggtcgtttaggggatgaagatcatagaatgtaacagcatttctgtattagtatgtgaggggtacatgtgttaaagggcggtcaaccctcctggacctccaggcctcgacagttgagagccaggtcaggctctgtattcctctagtgttcatactcctggacagacccaaagcatgacctggaattgagttggatttttttttttttttgacagagagtcttgctctgtcacccaggctggagtgcggtggcacaatcttggctcaactgcagcctccacccctgggttcaagcgattctcctgcctcagcctcccaagcataatagctgggactacaggcatgcgtcaccacgcccagctaatttttgtatttttagtagagatggaggttttactgtggtggccaggctggtctcaaactcctgacctcaagtgatccacctgccttggcctcccaaagtgctgagattgcaggcgtgagccaccgcatgtggctgagttggatattttagaacacagatgaatgcaatggcctccctggcctcctcactttccctcatccttgctatttacagtttctcattgaccttcatggggaaggaggaaaaagggagggagtgacacacttattctccaggtggcccaggaagagaggagggcaggagagccccctgtcttagaggtcaaaatacaggcctctagctggtaggctggggtggtatcttagggtacactgttgtgggctgtgcccttacattaccaggcagaagcctgcagtgcaaaagacctctgcgtttcctcacaatagtgtcagattggaaggatcaagggaagactcaaggactcatgaggtcttttttctctgtctccttgtacaaccttagaggaagctgcatgtatttgatgacaccttccaggaactgcccaataccgaatggcccttctcaccacaattcctcttactgcagtctaaagcgtacttttttcttaggctgagccaggtctgaatggcagtcagttgttttccttggactgagtctcagtctaccccaccctaatgttcaaagtttgaatgaaggaatgttccaattgatgactcctagagacactaacatccttaggtgttatcctacagtctgcctggatgttgttcccatcaccatcgccaatacaagtaataagtgattgaagtgtttgtgtttaaagcagagcctctatgggccatcttattatgactttttttgagacagggtcgtgctctgttgaccaggctggagtgcagcggcatgatcataacttgctgtagccttgaactcctggcctcaagtgatcctcccacctctgccccccaaagtgctaggatgacaagtgtgagccacaggctcggccccatcttacatttcagaaggtgccagcagtcggccaaggcctcagagctagtgagagctgacttcccatactcatgcctcatgactctgccgcattgcccagtccccaccagaaacagagatctcgtgtgagattggtcagtgtggagtccaaagtgtagtctttgcagcttagttgtgtttcacaagttaacaatgaacatacctgctactgcccggatctcctgtcctggcctcataacctcctcaggtggcccaaattgcctatctctaaagagctgtcagtgggaggcctgctaacacaacgggctgtttgactttgcctttgaggcaatgtgatccatggagtgaacatggcatgaggagccgggtgacctggttctagttttggttccagttcattcattcattcattcattcattcattcattcagatggagtctcgctcaggctggaatgcagtggcgcagtctcagctcactgcatcctctgcctcctcggttcaatcaattctcctgcctcagcctctagcgtagctgagattacaggctcccaccaccacacctgactaggtgagctgatgctggtttgaatccaagtctgtctccaaagcctatgcagttgcagggagtgtttcccgaggactgtaggatgataggattccctaagatcccttcaggcccaggagtccttatttcttcctaaaaatttttgagtgcctactatgagacagagccagccccctgtcatagaggtcaaaatatgctttatttgttctcacactgacttaaacatatgaatatattaaatgtgtaatttacagtgttctatatataaggaaaagtgcatgtatgaggtggtgactgtgtgttaagctgggaggagctgacagaaacggggggtgccagtggccagggcgggtggtgtctcagagctggtctcggaaacatcagttcctactgtgtagagagatctcaggttgggcgcagtgttggagtgtgggtatggagcccagcatccatgggaaggacacaaaaaataaagggaagtttcagaaaaaggtctgggcccagtacagtggctcatgcttgtactcccagcactttgggaggcagaggtgggtggagtgcttgagctcagtagcttgagaccagcctgggcaacatagagacctcatctctgtttaaaagaggagagatgggggagagagaggaagaaggagggagggaggacgggagggactctgaaggactatttgatttgaaatatgaccttcagaatatgtacactccagagacggtttcctgagtctgctagtgctgaggaggaagagcagtcagaaccaaatggggattgacttgtgaagacagggaattgttccttagggacagagaggaacctggaatgggggaccttccccatcgctccctgcaactgcacagaccttggagacagacttgattcaaaccccagttctgtcacttactacgtgttctttggcaagtaactcatacccctatgcctcagtgtttgggggtattttttgagacggagtctcactctatcgcccaggctggagtgcagtggcgtgatctcggctcactgcaaactccgcctgccaggttcatgccattctcctgcctc[224 bp omitted]ggctaggcttgtcttgagctcctgacctcaggtgatccgtctgcctcagcctcccaaagtgctgggattacaggcctaagccaccgcgaacctggcccctgtgcctcagttttgtcctttgtaaaatgaaggtaacaagactcacctaatagggatgttgagaggattaaataaaagggatgtaaagtgcttagtctggtaaatgctcattagacaggtggtagctgcccaacatctcttattgcacaaagttcccagaaagcgtgtctcctggggttctttaacattcctctccccctgacttagtattttgtttaagaaagagaaaaccacccagtctattgattttaaggtaaatggctgagagtgagtcagtgagccccaggtgtagacctggaattctgtgggcttggcttccctttcccagtcctagagcctcctaccatctcctgaaagtcttccagcgtcactgcaaggaagagtaacttcaaaatcttctatctgaacacgaaactcctgtttgtcctgactcaggaattccggcaatcactgggcagtcactctggccctgcgtgctgttttctgtaaaagctctggacccacccagagaaagcattcagcctgaggggaaaacctatgcctcacccttggggacacacagctttgttgggatgtgagagacaagacattggcacagaaatgtataaagagctttattgaaaggcacagattgaaggctgggcggctcaggatgctgggctccttactctgccttgcctggagatttgagattcctgccttgagcctttgtgtgctccccacccctgctcctcccttggctaactcttgcctgtccctgtggtctcagcgtgttttgtttgtttgtttgagatggagttttgctcttgttgcccaggctggagtgcaatggtgcgatcttggctcatcgcaacctccatctcctggtttaagcgattctcctgcctcagcctcccgagtagctgggattacaggcacccgccaccatgcccggctaattttttgtatgtttagtagaggtggggtttctccatgttggtcaggctagtctcgaactcccggcctcaggtggtccgcccgcctcggcctcccaaagcgctgggattacaggtgtgagccaccgcgcccggctggtctcagcttaaacatcacttccttagcgagcctttcctggctcccttcccatcttgacctccctttaatctttcttttcttcttttttttgagacactgtctccctctgtcatccaggctgtagtgcagtggcgcaagcgtggctcactgcagcctccttgaatcgttctgatagcactctgtattttttcatcagagtctttcacaggtgttgtgtaattatgtctttaatgtctgcttccttgattagactgtaagctccatgaaggaagaagggaccatttctgttttgttcaacgccacgttgtagtatctagcaatgcctctacatagctgacactcagtgtttgttgaatgaatgcatgagctggctcaccaggccatagatttggcatgaaaggtgtctgggaaggtttcttaggataaacaggagagacaggcctggtgaaaagttgagtgaacatgtttgctccatcctgctggtcaggaagttccccttctgtctcacctgcgtctcttcagctgtaatttatcctgggttggtccttggtggggccagagaatatctggtctccaccctttggagagtaaccctgttctttctcagagtgtgattcagacagtccttcctccccttcctgctggccccccccgccctctacctgttcttcctacagctgactcagcttcacaccctctccctctccttccaggatctcttttcctgtccccttgtccttcagagctttccttcctaagttttctctcatggcctgtcattggtcttctggaattcgaaatcatatgggtacaggtcacaagttttcttggtcatgaagcttctctagtctcttccttgggtttgtggacacctgactcccacagaaggaggctggcaataagatataatgatctgtttgtgctgcaattgaaaaccagcagcaagaagccttattattatccaacccctcattactagtgttgtcctcctccgttagcttggtatctgccagcctgaacgggcctggcatctcctttctgccccctcccactgccatgctgtgcccttccttgctctctctggtgtctgcttcccagggactggccctcctccctgcccctgtcagcctgcctccgaggccacagatctggttttcctcccttctgtctcacctgccttcctctcaattctactttttatcttgtttcttctctcctgaactgccacacttcaccctaaatcccagtaacgccaacagttttggtaaatcactttttgccacagttttgccttgctttgtgggagccagtttcttcataatgactctatgcaaatttgtagcattttatggattttaaaatgtttccacatcggtgaattcttgtgaaatgggcctgggtagataaggaaaagaacctccaagaggttaagtgatttgcggatttgcctaaattatacagaagagtcagaaccagtgcccaggccttctgattcttagtgcagtaaacactaagcaccatcattccatttcaccacactcctgtcttgctgttgtcctcagctaagaaagcctacccctgagttaccctcttccatcttagagccttcctgctcgctgtctgcccccctgcgatggggacttctttggcccttctcacccagcccagcctctgcccgtttccttctcctttccactgcgctgagctcttttctcctccgagaagccttcccttcatctctcctggccccattgtctcccgacctctttgggccattattagtgttcccgtgtggtttttgccaaccacgtaggaattccctgccttaagaaagtccactctcgggccgtgcgtggtggctcacgcctgtaatcccagcactttaggaggccaaggtgggtggatcacctgaggtcaggagttcaagaccagcctgaccaacaaggtaaaccctgtctctactaaaaatacaaaaattagccgggtgtggtggcttgtgcctgtaatcccaactacttgggaggctgggacaggagaatcacttgaatcggggaggcagagg[138 bp omitted]atgaggtgctgattcatatgacaaaaaggagattcacttttagtagctgctctaatgcattccacttaagtgaatattcaaggattattttggaaggatggagataatccaaaactagtgtgagaaactgctgcattaaggaaggagggaggtttttctagataactgctgcattaaggaaggagggaggtttttcttttatttctgtattcattcattccacagacaggtattgagggcagccctgacctccaagaacttagtctagcagaggagacagataagagaatcaatcacaaaaatgtaattggtgtcacgaaagagtcagtacagggtattgtgggaggagaggattgtgaggggcacttcctggaggtgacattgtctcagtggaggtcgggaggcacaggcacgaggcatccaggtaaagaggaggagagtgatgaacagcatgtggagacccaggagtgagaaggaacagagagaaagccactagttagtgcagtgttcctgcccctctgcctcatccccacaccagcaagaaccaaaaggcaccagcatgagaattggcaaggctccaggtaaaccatagctgggatattcagctgtacagcagtcatatgtgagcctgaggaagaacctgtttggcccacagagggagacagaatctactgggtggggggggtgtgatttgtgggggagtgtggttgatgggtggagtgtgtttggtgggggagtgtggtttgtgggggagtgtggttggtgggggagtgtggttggtgggggagtgtggttggtgggggagtgtgatttgtgggggagtgtggttggtgggggagtgtggttgttggggggagtgtggttgagggggagtgtggttggtggggagtgtggttggtggaggagtgtgattgatgggggagtgtggttggtggggggagtgtggttggtggggagagtgtggttgagggggagtgtggttggtggggggagtgtggttgatggggggagtgtggttggtgggggaagtgtggttgggggagtgtggtggggggagtgtggttggtgggggagtgtggttggtgggggagtgtggttgagggggagtgtggttggtggggggagtgtggttggtggggggagtgtggttggtgagggagtgtggttggtgggaagagtgtggttggtggggggaatgtggttggtaggtagagtggttggtgggggagtgtggttggtgggaagagtgtggttggtgggggagtgtggttggtgggaagagtgtggttggggggagtgtggttggtgggaagagtgtggttgggggagtgtggttggtggagtgtggttgagggggagtgtggttggtggggggagtgtggttggtgggaagagtgtggttggtgggggagtgtggttgttgctgtgtgccatcggaaggctatgcaagtttgagcgcttgcttcaccttgacaaacatttcacttgttagagccctggctttctcatctgtgctctgagctagtcattcctgccaagcttccctgcaggtttaagtgcagatgcagtcatgactgtgaaagcaccctgtgaactgtaaagtctgggcagttgggtggtggtaggagaggcagcaactgtgagaggatgaacttgattctgctgatctcggacggaaactgattcttgggagagagacagaatcaaacggctctgacatttgaaaagccatggcctcgcttacctacagtgagacttgagaagaagtgctggggaggtaaaggctgagataccacctccgctgcctgaaagactttgcaagatactccagctggggataggagatggctagaatgacctccaactatcttcacacccgaggctggggctgcccttccaggcctgcagttctgtattttcccttagaaggttctggaggcagacggaacctcagaagcaaacggtttattttttaggtttttcagtttatttttaaatttctgactgtgatggtgtttattttttccttttccctttccccacttccccggctcagcatcagaaagggaccatctgtccgttgccttgctgtggccattttagaaccagcgcaaggctgcttgaatctggtcccctcttctccctcactccctcccccaccacctggctttctctactctgcactgcctgctttcatccagctccctccaggtgtcagctgccacctcttataggcctccatctgtgaagacctccaggctgagtccagccaccagaccagggcccctgtctgaggcagccagatctgtggggaacctagacatggaggcagcaaaattaccctttgagaggaggaggggaataaattccagtctccttgctccaggcagggcccctctgctctgactggtttctgatgagaatggtatgtgtattcatgtatgtgtcatgtcctgacttgtttctgcctctgcatgtacctgcaagtcagtgtgtgtgtgcatgcgtgtgtctcacacatccctctggcatagagatccatgagtgatttataaactgcctttcctcccatcacataaatatttttcctggtttcttcgccttccttctacttctagaactggcctgatttcctcccctccagtgcttcattcccataaaaacacttcaaaacacaggtagccatcgatagacagaggacaagtacttcacgttgtggattcagaataaaaagatccggttgagttccacagtgtgagaggcagggttagcagagtggagagtctgtttcagagagtaagaagcgctgagaaaaggagtttttttgaaggcttcattaaaaagagtccaggctgggcgcggtggctcccgcctatagtcccagcactttgggaggcccaggtgggcagatcacttgaggtcagcaattcgagaccagcctggccaacatggtgaaaccccatctctactaaaaatacaaaagattagccgggcgtggtggtgggcgcctatagtcccagctattactatacttaggaagctgaggcaggagaattgcttgaacctagaaggggaggttgcagtgagctgagattgtgccaccacactcctgtcttaaaaaaaaaaaaaaggccaggcatggtggctcacacctgtaatcccagcactttgggaggct[134 bp omitted]gaggcaggaga[209 bp omitted]aaacatacaaaaaattagccgagtgtggtggcaggtgcctgtagtcccagctactcgggaggc[137 bp omitted]ctaaaaatacaaaaaaaatcagctggatgtggtagcaggcacctgtaatcccagctactcaggaggctgaggcgggagaatcacttgaacctgggagatggaagttgcagtgagctgagatcatgccactgcactccagcctgggtgacaaaagcgagactctatctcaaaaaaaaaaaaaaagtccagttgatggtggtatatcatggacagtaggaaattgatgagggtatcagcctgccttctctcttcctttcatttgctcagtggagagatgctggtgaccccttctccttctctcgccataggaacatttaatctgtctcatgctttggctttgggcctgccattcaccccaagcaccttggggtataagtggggatgatgctgtctacctgcttcctagttggctctggggtaaatggagacttcttcaggcctgggaggccacctcccattgagaaaggcaagcatctcgcgctctacttaccctctgggtccttgaggggctgtgtccagtatctctgcttgggtaggaaggaggtgatcttatcagacttttcctgccacttccctgtctccagctcacacacccactcccgttttctctctcttacgtactcacactctcttttttttttctttccctcccccgacatctgagaactttatcagacacagctgccgcacagggcctggcagcgcgggctggagagggtggttccatccaaggagcctccgcaatgggaacctccatgacgtgacagataggtgggagatgagggctgctccacaggggtatggacaggccaaatctttataaatatctaatgaagagaaaatgacaactctaattcatccttatacatagagtactcaagggagatgggtggggcatccaggggcctgagtcctcactggtcggggacctggatgggtgatgagtaggttcagatgtccacagcatggggcgggagggggcaaggcctggccaacagacgatgaacacgaggacactgtacacttagaagatcaactactgagggccagctgcccagcacatgcgtgtcaggctgtttgttccggaatgaggaggggtggtctttacatcgtattctgtgactggtgggttttgagaggggctgctttgtggagagaatgagcaccttggcaaagatgaggatcagtatcatgcctacaaatagtcggggctgctgggcagtgccacacttgccagtgtcccccacgatgacgatggcaaagccggctgccaggccactcaggccagcgcccagctggaggaaactgctatagagactgttgtcatcattcagggagttggcaggggggacagccgccactaggccatagatggtgatgataccagccatgaccactgggatgatggacttcatgtggatcagctctggccacatgacagacatggccatgatgccggtgccattcttggccatgccacaggcagcacccaggccactggagaccatggtggccatagcacccgagatggtgaaaaccaaagcatactcggggctgttgttggacatgtctgtgagtggggagggggacaaggatgggcatggcagagagtgagtgcaaagacagtggactagtggcagcaaagatgctggttttttttttttttttttttttttttgagatggagtgtcactctgtagcccaagctggaatgcaatggtgcgatctcagctcacttcaacctctgcctccagggctcaagccattctcatgcctcagcctcccgagtagctggaactataggcacgcaccaccatgcccagctaattttttgtatttttagtagagatggggtttcaccatgttgccccgtatggtctcaaactcctgagctcaggcaatccgccagccttggcatcccaaagtgctgcgattataggggtgagccaccgcgcccagccaagatgctctttcttaccacacacacaccctcctatttcttttcttatgcacacacacagacacacacacagcctttagctactcctaattgaagggtgcctaagacaccacccttctgtcagaatacttgcccctacttccaaatctctgccagtactgtatccttgtggaacttaacttaaattgttggggagaccccatctgtcctttgtctctcaggcccttatcccttcccctgtggtggcttcagaatatctcctacagatggggtttagggttagtaatctggtggtactggggctaagggataggttttaaagctccatttgcatagcagtcactattttaacacttagattgttggtgttttggggtgtctttaagggagctgatgaatttatgggaggctaaatatcccctcccccactgggtatagccactgcctttgcccccctcttcctctctgtgtgggccttctggattacaggaagagctcaggaaaacaggcctattgttttcatctgggaggggggagggcctcccaggccagctcaggctcactgtcctttgaactggtacccgataaacagaggctccaagacgctggcagccttgttcttccaaggcaagggagttatttggcttgagactttattctgttctgccagctcttgttggttccctgtttatttttttttaatttaaatttaatttttttttttttttgagacgaggtcttgctctgttgcccaggctggagtgcagtggtgcagtctcggctcactgcaacctccgcctcccagtctcaagtgattctcatgccttaccctcctgagtagctgggattacaggcatgcactaccatgcccagctaatttttgtatttgtaatagagatggggtttcaccatgttggccagacttggttccctctttagaccacaagttcccattctctttccctagtgtcctatgaaattctcttctcccgcttccgcatctgtttttctctatcacaggtttctcagaatctttctggctgctgtatagtcagtcctggtatggttagtaacagcaggaagcctgcctttttggaagtacaaggagctaggaaaggaggggtctctcccagactagagaggtcttctcccctagcctcacagctagctgactctgccttgtcctcccaacacccgggattccccccggcccctcccaacaccaggcacccggggcagccccacctcctgccctgtttcctgtcaggggtaggatggcaccttgcctgggtctgggaacagcactggctctagcagcaggacctgccggggcatatctgagtgaataatcattgctgggctcgaagcacaggagagaccagtccttccttgtctccactgggctgtttagtgcttctttcccaaggacttccatcccttccccaggctttatggttccagttcttctaccattctggaagctccctagaatctcctggaatgcttaatggacctttccagcaccgaaattcaagaattatgactcatcggtcagcagaaaagtgaggataccttttcctaacctacctgcttcccctgcagtttcctcacaatcttactctttatattttagcatatgtaacttctcaggatgttaattctgttctctctgtgttggtgtctgagcacccagaaggtagagccaggggcacttataaaccaggagcattatttgacaggcacttaagaaagacactggctacgtaatcccagcactttgggaggctgaggcggatggatcacatgaggtcaggagttcgagaccagcctggccaacatggtgaaaccctgtctctactaaaaatacaaaaattagctgggtgtggttgcacacgcctgtaatcccagctacctgggaggctgaggcaggagaatcgcttgaacttgggaggcggaggttgcagtgagcctagattttgccattgcactccagcctgggtgacaagagcgaaactccatctcaaaaaaaaaaaaaaaaaaaaaaaaaaagatgctggctaatattgataataacagtttgcatttgctaaagtacttaaaaaaaaaacctttacccctcaaagggtttcatctacatgcaaaaccaacaccgtaggaactactttccgcatgcggagccgggtacagagggaaggggcgcgtccgggaactacttgccgcatgcggagcggggtacagagggaaggggcgcgtccgggaactactggccccatgcggagcggggtacagggggaagggtcgcgtccgggaactacttgccgcatgcggagcggggtacagagggaaggggcatgtcgttagaggagctactgttagtggaatgaggacgggtagccagagttctcatctgccagctccaggccacttccaagaaatgtgacccccaagcctctggtgcttgcctccttctgctcattcagtcgtccacctctttcattctggattccaccatgagtccaggcctctcctgcatttctagatttccacgtgctgattgtgagggactgacgggggtttcaccttctctccttttcctggccccacagccttggctcacgcttcctaggctctgagtttcagttcgtgtcccagcctcccaaccggacagcgttctggaaacagtttatgcatgaactcttgcattttctcttgggaaataatcaaaccctttgtttctaatctcctctcagtctgtactactactactacactaacatgactttggttttggggaaaggaaaggaaaatgtctgttgatgctgggccccaggcagcaccgtgagagctgcaacgggctcacatttgcccctagtttttcctccaggtaggagctgtgggaggagtccagggagtcccttgaggctgagcagagcaaagaagcaagggctcaaggctggtgtgtgcctggttctcccctggtcagttctagggagcagagaccgtggtgcaggtggaaggaccacggcgctgtgtcccttaactgtacagcaccagtgcgcgccacgtgctggggagatgccgaagccttagggagcaacttcgggaagcttttgaagctggggaaactaatacacttgaaatagttaaagggggatttaaggcagaggagcagagtctgaggggacagctcgtgccctccccttgcctgcctcaggccaccagctttgtgcctcttctctccctccagcccttgttcctcagcttcttctgaaaagctttccttgagcaaacccagctccgccttgctctgtctggcgttgaatcattaaatcagcgacgatttggtgacctcgtatatactcagaacatacctggagctgtgaggggaacaggagcaaaccacaggcagctccctagtgaggcgagtgcagtgtcaccaggacgtgctgcttggggccagcctggtgtggccagtgccttgcattgtatgcggagctgcgagagacgagacatctaccaagagtttctgcgttaacatcactgttggctcttcatagctgagcaaagcaatatgtacaattatacatcgtaaacaacgcagggcacagtgccaggcgacatctatttcgacccacatgaggcgctctgtctgttattccagagccccacctttcaataattgagtccaacacttgtatggtatcttcttgagcctctccatcaaccaaaggtttttatttatttatttttttgagttggagtctcactctgttgcccaaggtggattgcagtggcacgatctcagtttactgtaacctccgcctcctgggttcaagcgattctcctgccccagcctccctagtagctgagattacaggcacgtgccaccacacccagatactttctgtatttttagtagagacagagtttcaccatgttggccaggctggtcttgaactcctgacctcaggtaatccactcgcctcagcctcccaaggtgctgggattacagggtgagccaccatgcccggcccaaccaaagattttacacaattttattatatgtaaaatgtgaggagataagacatgcttagtaatagaagctctagtgagtgagagaaagcagccgcagactgttaccccacatgctcactatgcgacaatagtcgttttgtgtatgttatagattcagagctgcacagataaagtactgctgttttcattcgggcacccatctcagtgtgaggccgcctaattctcattccatgtatacccaagtaccacctagaaatggctcctgcccttaatgagcttctgttctacttgtggagatgaggcttggtcctgtgaaaggttaaatagagatgttgtggtctggcttgttgggttggaaggaatctgctctagctaagtcaaataaagggagagatgcagcagagactcgagccggctacatgcattcaaaccctggctctgccactgaaatagctgtttgaccttggcaagttatttaccttccctgagcctgtttcctcctctgtaaagtgagaataataataatatct[142 bp omitted]gcgaaaccccgtctctactaaaaatacaaaaactagcctggcgtggtggcgggcacctgtaatcctagctactgggaggctgaggcaggagaactgcttgaatccaggaagtggaggttgcagtgagccaagattgcgccactgcactccagcctgggtgacagagtgagaatccatctcaaaaaaaaaaaaagaaaaattagttggtgtgtgtaaaacacttagcacagtgccaggctgtcaatattattttttatttaaagtcaagacccttcttggaagggcgtgtggctcatgcctgtaattctagcactttgtgtgtccgaggcagcaggattgcttgagcccaggagttcaataccagcctgggcaacacagtgagatcccatctctacaaaaaaggttttaaaaagtagctgggcatgatggtgcatgcccgtggttccagctactcaggaagctgaggtgggaggactgcttgaacccaagaggttgaagctgcagtgggctgcaattgcaccactgcactccagcctgggcaacattgcaagaccctgcctcacaaaacaaaaaccaaaaaaaatccttctcacttcacatgccaagggaaaagaaaagagaaaagaaaaagaatcttgttcgaacctaggcacctgaatggcagcccagacagttccttggaactgaaaccatagggtggttctgggttaatggtaacagcgggggatagctagagtcagttggtcactctcccgcttctgtctccccctgtagttcccatgccctctccttccatgtctgctgtgctctctgtgtacagtgtggccactctgcccactcatggcctctgctttcctttacctgagataataatgggctctccagccttgactctccatgcactctttggcatcttcccttttatttgaaatggctgaaggggaagtttgccttaggttaccttttttccttcaatcttggactggctccctggggtcaggaactcatgtcttaaactgttgctggggctagaaaggggaggaaatggtggaaaacccggtcctttaggcaacaggagctatgagccaggcaaagcacactgcaggccttgaggtcagatttttcagtcaaatcttggctctaccacttcctagcctgggcaagtgtttaattgttgtaaactttttcacctgtgaaatgagtataacaatagtacccacttcaaagtttgtcatgtgagattatacttctaaagtgctcggcagtaccaggaacaaatgaaatgctcaaaaattgctagctgtctcattattattattattattattatttttgagacggagtctcactctgtcacccaggctggagtgcggtggcgcaatctcggctcactgcaaccttcgcctcccgggttcaagagattctcctgcct[134 bp omitted]cggcctcccaaagtgctgggattataggagtgagccaccttgcccggcctagctgtgtcattattaaagggctatgggggccaggtgcagtggctcatgcctgtaatcccggcactttgggaggctgaggtgggtggatcacctgaggtcgggtgttcgagaccagcctgaccgacatggagaaaccccgtctctactaaaaatacaaaattagccaggcgtggtggcgcatgcctgtaatcccagctactcgggaggctgaggcaggagaatcgcttgaacctgggaggcggaggttgcagtgagccgaaatcacacccttgcactccagcctgggcaacaagagcaaaactctgtctcaaaaagaataaataattaattaattaaataaagggctatgggggccgggcctggtggctcatgcctgtaatcccagtactttgggaggccgaggtggagtggatcacctgaggttaggagttcgagaccagcctggccaacatggtgaaaccccatctctactaaaaatacaaaaattagccgggcatggtggtgggtgcctgtaatcccagctactggggaggctgaggcaggagaatcgcttgaacccgggagatagatgttgcagtgagccgagatcgcaccattgaactccagcctaggcgacaagagtgagactccatctcaaaaaaaagagctatggggagagtggacaatgacagtgatctctgagatggccgatatgggcaagctcctaaagtggtaaagatcaggaccggaaggatggggcagattacagcactcattgtttagaggagggtactggaaagccggttagaccaccgcagcttgaatatgtcttcttcaaaagaaccttttcctggctccccagcctcggtcaggtgtgctctcttggcaccctgcacttcacagcacataagacagaccagagctctttccacgaccaaaaccttccttcctcctttttggtccaagagacacacttggcagcagcaggaggagtgtcactccatacgtttttatttttatctttacttttttatctt[148 bp omitted]cctccgtctctactaaaaacacacaaaaaattagccgggtgtagtggtgggcgcctgtaatcccagctacttgggaggctgaggcaggagaatcccttgaacccgggaggtggaggttgcagtgagccgagatcgcgccattgcactccagcctgggcaacagggtgagacactgtctcaaaaaataaataaataaataaataaataaccagacactggactagagggggaaagtttcaaggatttttttttcttcccctttttctcataaggacaaatgtgcctatgtggaacagctacatagaataaaatgatgaaattgtgatctatgaaaaaaacattaaaataggctaggcatggtagctcacacctgtaatctcagcactttggaagacaggcaggaggatcgcttgagcccagaagttcgagaccagcctgatcaacacagggagacccgtctctaccaaaaaaaaaaaaaaaaaaaagccagtatccaggcagagtggtgtgtgtgcttgtagtcccagttacctggtaggctagggcaggaggatcacttgagtccaggagttcgaggctacagtgagctatgattgtgccactgcactccagcctaggtgacagagtgagaacctgtctcaaaaaagaaacgatacatgggtttgtgtcatctgagatgcaacgaaagaaagaaagaaaacaaagacataccacagctgtaattacacaattaattgtagaggttattaatgtgtgcctctctcctcagaacataaacaccagtaaggtagggactgcttcagttactcactgttctattccccagcctagcacagtttctggtacacaataggaaggaattaatagtcgttaggttggcagcctcatggagtgtgg[216 bp omitted]gaggcaggagaatcgcttgaactaggaagttggaggttgcagggagccgagatcgcgccactgaactccagcctggtgacagagtgagactccgtctcaaaattaaaaaaaaaaaaaaatttctatcttactgaaagggaacttagagaagttaagtggtccttgaacacacagcctgttggcagcagagccaagaataagaaaccaaattctgagcaacatagtgagaccctgattctaccaaaaaaaaaaaaaaaaatagccaggcatgatggcacacgcctgtagtcccggctacttgggaggctgaggtaggattgcttaagcacagcagcctgagacggcagtgagccatgattctggcactgcactccagcctgggtgacagagcaacactgcatctcaattaaaaaacaaaaaactcgatcgggcgcggtggctcacgcctggaatcccagcacttcgggaggccgaggcaggcggatcacgaggtcaggagattgagaccatcctggccaacgtggtgaaaccccatctctactaaaaatacagaaaattagccgggcgtggtggcgggcgcctgtagtcccagctgctccggaggctgaggcgggacaatggcgtgaacccgggaggcggagcttgtagtgaaccgggaccgtgccgcttgcactccagcctgggtgacagagtgagactcgtctcaaaataataataataataataataataataataaactgcacactatagtaggtgctcttaggactgtttttttttttttttttttttttttttaagccagggtcttgctctgtcatccaggctggagtgcagtggcatgaccacagctcactgtaggctcatcctcctgggctcaagtgatcctcctatctcagtctcctgagtggctcatacctgtaatctcagggttacaggtatgagccaccatgccctacctcttaggatttttaaaaatgcgttaaaaaaataggtacacggtcaggtacaatggctcacaattgtaatcctaacactttgaaaggctgaggcaggaggatcacttgagcccaggagtttgagaccagcctgggcaacatagtgagacctagctctaaaaaagaataataattaaaatttttaaaaattgggccaggtacagtggctcacgcctataatcccagcactttggggggctaaggtgggcggatcacctgaggttaggagtttgaggccagcctggccaacatggcgaaaccccatctctactaaaattacaaaaattagccaggtatggtggtcacagctacttgggaggctggtaatcacagctactggtgaggctgaggcaggagaattgcttgaacctggaaggcggaggtggcagtgagccaagatggcgccattgcactccagcctgggtgacagagtgagactgtctccaaaaaagaaaaaaaaaaggaattgatacataattatacatattgatggaatacatgtgatcttttgatacatgcatactatgtataattaaatcagcataatttgggcatccattacctcaaacgcttattttgttgagaacattccatatcttctagctctttttttttttttttaatatctttagacacagtcttgctctgttgcttaggctggagtgcaatggcatgatctcggctcactgcaacctccaccttccaggttctagtgattctcctgcctcagcctcctgagtagctgggactacaggcatacaccaccacgcccagctaatttttgtatttttagtagagatggggtttcacccagt[137 bp omitted]ctgtggttaccctactgtgctgtcaaacactagaaccttctaatgtttcttctatccacctgtatttctgaatccattaaccagcctctcttcatccccctgcccttcacagcttctggcaacccccgttctactctccacctccttgagaccagctctttctagtctccatatatgagagagtccatgtaatgtctgtctttctgtgcctggtgtatttcacttaacataatatcctctgggctcttccatgttgctgcaagtggacagatttcattactttttatggatgaataatattcgattgtatagatatgccatattttatgtatgcatttatttaggttaacgctatatcttggctatgataactagtgctacaataaatataggagtgtagatgtctcttccatgtactgatttcttctcttttttttcttttttttgagacagggtctcactctgttgcccaggttggagcgcagtggcatgatcatggcttactgcatgcagcctcaacctcccaggctcaagcagtcctcccacctcagcctcctaagtagctggaagcacaggtgcacactgccacacctggctaattatttatttatttatttattttttgaggtggagtctcgctctgtcgtgcaggctggtgtgcagtggcgtaatctctgctcactgcaagctctgcctcccaggttcacgccattctcctgccccagcctcccaagtagctgggactacaggcgccagccaccacgcccggctaatttttttttatttttagtagagacggggtt[131 bp omitted]atttatttatttatttatttatttatttatttatttatttttgagacagcgtttcactcctatcgcccaggctgcagtgcaatggcacgatctcggctcactgtaacttccacctcccagagtcaagcaattctgcctcagcctccctagtaattgggactacaggtgcataccaccacgtccagctaattttttgtactttttatagagacacggggtctcgccatgttgctcaggatggtctctaactcctgggctcaagtgatcctcctgcctcggcctcccaaagtgctcacattacaggcgtgggccactgtacctgacgattttttctcttttggatatatacccagcagtggtattgcccgatcttacgatagttctgttttcagttttttgaggaacctgcttactgttgtccatagaggctgtactaatttagattcccaccaaaagtgtataagagttcccctttctccatatccttggcagcatctctttttttttttgtctttttaaaattattttatttttatttattcatttttattttatttattattttatttgtttatttatttatttatttatttatttatttttgagacagagtctcagtttgttgcccaggctggggtgcagtggcgcaattttttttctttcttttttttttgagatggagtcttgctgtgtcgccccaggctggaatgcagtggcgtgaactcagctcactgcaggccccacctccagggttcacgccattctcctgcctcagcctcctgagtagctgggactacaggcacccgccatcatgcccagctaactttttttttttattttgtagtagagacggggtt[133 bp omitted]ttttattttttgtggaggagtggtttcactatgttgcccaggcatgtcttgaacttctgagctcaagtgatcctcccacctcagcctcccaaagtgttgggattacagttacaggtgtgagccactatgcccagcctttttgtcttttgataataaccctttaaatggggtgagatgctatctcattgggttttgatttgcatttctcctattattagtgatattgaaggattatttttaataacagctttattgaaatataatttacataccataaaatttacccttttaaaatattttaggccaggtgtggtggctcatgcctgtaatgccagcactttgggaggccaaggcgggcggatcacttgaactcaggagttcaagaccagcttgggcgacatagtgaaaccccatctctacaaaaaatataaaaattagccaggtgtggtggtgcgcacctgtagtcccagctacttgggagtttgaggcaggaggattgcttgagctcaggaggtggaggttgcagtgagctgagattacactactgcactccagcctcagcaacaaagtgagaccctgtctcaaaaaacaaactaacaaaaattaaaataaaatattttaaagtggtttttggtatactcacagacttatgcaaccatcttcactatctaatttcagaaccttttcattatccccagatgaaacccagtacgcattagcagtcattgcccatcttctccttcctcccagcccctggcaaccactaatctacttctcatctctttagacttgcctattctggacgttacacataaatgtagccacataatatgtggccttttgtgactagcttctttcataagcataatgtcttcaaggttcatccatgttgcaacatctagcagtagtttattccctttttttgttttgtttgttttaattttttttttttttttttttttagaggcagggtctcactcactctgtcacccaggctggggtgcagtggtgctatcataggtcactactgccttccgctcctgggctcaagggatccttccacctcagcctcccatgtagctgggactacaggtacatgccaccttgcctcactaattttttaaattttttgtagagatgtggtcttattatcttgccaaggttggtctcaaacctgccaagcagtctcaaaccacttgacctcaagtgatcctcccgcctctgcctcccaaagtgctggggttatagacatgagccaccatacctggtcttcatttctttttattgccaatatcattctattatatagatataccacatttatctgttcatcagttgatggatatttgggtggtttctactttttggttgttaataatcctcctgtgggcatccatctacatatttttgtgtggatatatgttctcagttttcttgagtatctacctagaagtggaatggctgagtgatatgataactcattgtttaacatttgaggaactgccaaactgttttccaaagtggctggaccattttacattcccagcagcagtgtatgacaatttcagtttctccatgccctcagcaacgcttttgattgtccatccttttctagatggggtagggaggtgatctcactctgttgcccaggctgaagtacagtggcatgaccatagctcactgtagcctcaaactcctggacttataggatcctcctgcctcagcctcctgagggaaatacaaatcaaaaccacaatgagataccacttcacacctactaggatggctccaatcaaaaggatggacaggctgggtacagtggctcactcctgtaatcccgcactttgggaggccgaggtgggcggatcacttgaggtcaggagtttgacactggcctggacaacatggtgaaatcctgtctctactaaaatacaaaaaattagccaagtgtggtggcaggcagctgtaatcccagctattcaggagactgaggcaagagaatcacttgaacccaggaggtggaggttgcagtgagctgagattgcaccactgcactccagcctgagcaacagaatgagactaagtcttaaaaaaaaaaaaaaaaaggatggacagagtcaggcatggtgcctcacccctgtaatcccagcagtttgggaggccaaggcaggtggatctctttagctcaggattcaagaccagcctgggca[141 bp omitted]aaaccccgtctctactaaaaatacaaaaaattacccaagtttggtggtgcgcgcctgtaatcccagctactcaggaggctgaagcaggagaattgcttgaacccaggaggcggaggttgcagtgagctgggatcgtggcactgcactccagcctgggtgacagagactctgtctcagaaacaaaagaaaaatcaactcctcaaacatccaccctttttggcttcttcccctccatgatgatgaacgatcttccctattttgaaaaccctattgtctgactttgctgccagctctagctgtcatctgattttcccccttcctctcaaggttagacttctccagaaagggtgctgccctcatttcctcagcacagccctgtctcctccagcccccgctgtctgccctctgctcacacagcggcagttcccagtggtttccgagctgctgaagtcagtgggatttttttcagtgccctctggctgctctgccgcattcgaggccatcactccccttatccccctgcagcctccatgaccatctcctcttctggcgtctgttctgctgctctcacgtgttgcccttggccatccacattctccctagatatcttgtttgtatctccaactcttacactcacgaatgtctgtaaattgtatttacagatccttgtttctaactgcacaatagaatgtacctgtgtatcctttaacatccccaattcaacattcaaacccagcctgttctcccacagcacagcatgacaatagaatgtacctgtgtatcctttaacatccccaattcaacattcaaacccagcctgttctcccacagcacagcatgacaatagaatgtacctgtgtatcctttaacatccccaattcaacattcaaacccagcctgttctcccacagcacagcatgacaatagaatgtacctgtgtatcctttaacatccccaattcaacattcaaacccagcctgctctcccacaacacagcatggtcttcgccactcttttttcttttctttttttttttttttttttgagaaggcgtctcactctttcacccaggctggagtgcagtggcgcaatttcggctcactgcaacctccacctcctgagttcaagcgattctcctgcctcagcctcccaagtagctgggtttacaggtgcccaccaccatatccagatgatttttgtattttttagtagagacaggacttcataatgttggccaggctggtctcgaactcctgacgtctgatgatccggcgttctcagcttcccaaagtgcagggattacagacatgagccatcacgcccaaccctaaggtggactttttacacaatccaaccccctcttagcttgtgggagaggaccgaggcctcaaacagttaaatacttgcacagaggcacacgactagtgccagagttgaaaacccctctcccatgctctttccaccacaccaagcagcatttcagcggctttcgtgctttcggttgctgtttatgatatataatcgtagactgccacattttcatatttgagtacttggccaatctataaaattataaggttttatatttctcatatattggtgagctcccttttgtgtctaattcgggagttattacatagtttgtgctcaggaaatatgtaatggatgaatgaaatgagatacgattgccttacaggttttccctgcttagggcttagcccagtgcaaggcaaatggaggcactcattcagaagatatttagtggttggataataacggggcatcgttaaatgtcaggctgaggtgttgggactctctaagcattggggagccccactaccagttctgggcagaagagtaaaatcaggaaagcgccattttggaagagttaaatcagtggcagcagaaggaagacatgggggaggctagagttccaggagggaggacatgagggattggtctgagttggtggacaagccaagcacatgttgaagggagaaaggacagggtggctgcgatacaggaaagggaggaggaggaggaggattaggcagaggctggactgtggtgggaaagcggtgctgctattgaaacatggagcatctgggtggggagggggtgagagaccacaaccagagtgccacgtgcgggaccccaacttgcttctctgaatcaccctttccagtaggagttttcaggaaaccgacttgaaacccattaaatgtcgatatctgaacccagggtgtctgacctcaaatattccttcctccctcagtgccgcccagacacgagaaggagacagattgggagtcaaggttacaaaattaaaatgtacttgtagtgatttgacttgatggtgacagatcattatggctctaacaggcccacggtattttccctcttagattaggagtgttcagaaaattatgaccctagatcctttttcctgtctccctccttctcagaaagagctacagtttgattcaagaaaggacttcgcagcagtcagttcagacgccccggaatggatgagttcttctgttggggagctctgtagggaactctatggtctttgagcctctaatctagaactgaagacggatgagatgacttttttcaggttccttccagctctcagggtcagaaagacctcttgttagccccctgcactgcagtgacaacacctctctttcctgtggatcctactgtgatttacacccgttaaatattgttttagctgtgcatgctgggtcatgcctataatattaatgtgttgggaggctgaggtgggaggattgcttgagcccaggagttcaaggctacagtgagctgtgatcatgccaccgcactcccacctgggcaacagagcgagatctgactctaaaaaaacaaaaatgaggccgtgcgcagtggctcacacctgtaatcccaacaccttgggaggctgaggtgggtggatcacctgaggtcaagagtttgagaccagtctgaccaacagggtgaaaccacgtctctactaaaaatacaaaattagctgggcgtggtggcacacgcctgtagtcccagctactcgggaggctgaggcaggagaatcatttgaacccaggaggtggaggttgcggtgagccaagatcgtgccattgcactccagctgggcaacaagagaaaaattccatttcaaaaaaaatgaataaatttgttaggttttttttccccccgccgagacagagccttgctctgtcgctttggttggagtgcagtggtgtgatctcggctcactgcaacctccacctcctgggttcaagtaattctcctgcctc[224 bp omitted]aatgtagacccacaaagttcttggtctggtcagcccagtccccttcagagcacagagaaggaacccccttcagctgtcaatacttcctcccgagcaggctgggctgtttcctcaggctgccgcgtgccaggcctcagtgaggtcctagacattacctggtgagcaaggagggctcagtccctttctccagtgaataagacaagtaaatgtagagcacaatgcctcgtgatacatgctctgatggggcaggcacagggtgccggggcacgtctccgctctccagctcctctttgagaaaatggaaaaagtgcacagtgaggacattttttaaaagccttgggctggtgtctctctggtcttcaacacgcccaagtcgtcttccttgggcttattacttcagtggatgaagtgcttttattggcatggatgtgggcttttttggtcgtgggattttttttttcctcccagaaaccctatgttagctttcaaaatcaaggagaaaggagttttagattatatgcttttaggattatcagcacagaggccacgtgttgcctggagagtttattcccaagtgccatcctcactttctgcctccgctcggtccctgcagcggtggggacgggcccacccagtgaaacaccaggactgtcagaactgtcggctctgaggcaggcgtggtggctcacacctgtaatcccagtactttgggaggccaaggcaggaggactgcttgaactcagaagtttgagaacagtctggacaacatagtgacaccccgtctctactaaaaataaaaaaaactagccaggagcggtggtgcatgcctgtggtcccagctgttcaggaggctgaggtggaggattgcttgagcccaggagactgaggctgcagtgagctgtgattgtaccactgcatccagcctgggtgacagagtgagactcagtctcaaaagaaaaaaaaaaaaaagagccatcattctgcaggaggtgcaggagtgtggacagtactgggctgtatctctcttcagcttgcagctccacctcccaatttctttctctcaaaaaaaaaaggttctgccaggagggtgtgggtggcctcccgaccgcagctgtgttgctgaggcctggcctgcctgctcttggcccagggggaggacgagcctctttagaggctttgtttgagcccttcgggctgtctccttctggcactgcttggctcagaaaagtaggaacagaaagttctcccttctcagaggccctttctcaccatcacctgctgactccctccgtccaggtccctttggccccaattgcctcaaaccctggcctggaagccctcagtctcagggggactgggaagagggaaggacaaaaggatggtggccctgaaattcctgctccctgctagctttcctcatccctgcttttaagaagtaagataataataatggtcattaacttttattgggcacacgctctgatgccaggaaccatctgaagcatttgatgggcatttcttcacttaaaatgtgagtaccaaccccagaggaaggtactcgggcaccctcattttgcacatgagggtacagacgcagtttctcggtgggtttgaaatcgggaacatgtctttgaaaagccatctgcgctctgactt[131 bp omitted]cctc[223 bp omitted]accaatccaggaaaagggcagccagccaccagggttcctgccacgtgccctcctgatatgctggtcttcactcccatatcttgactggataccactttacccccctctagctctgtaatccttttctaaagtcttgacacagtattcttctgtctcctgcccctaggaccctgctgggatctttgagcttgtggaggtggtcggcaatggaacctacggacaggtgtacaaggtgagacgaatggtgtggaagtatgacctccacatctgcagggcagtcttgggaggagtggaaggaagtagattcctggtctgcaggtctgaagggggctatgggagatgctagagtctagggccctggaaaggtagagtgggggagaggaaagagcacccagaaggaggtactgttgatgcctctctctacctgagtgcagagccagtcccggacatggtgggaacaggccagcagccaggcagggtggcctgcagcagtgagagcaggtggaagggcatacggccttgtgtgtcagaactctcctgggattcagagagagctaaggccagagatgtgggtttggcctctccccagaccacaaagagacccaggactttgaggtagtgggacctaatgggtggccttctgcagaggggatgtggcctctgctcccacagctggcctgctggggccagagctcaggcttttggcttttgagctgcctctgtccctgacagaagtggcaggttctcagccactgatggtagcttttaggttggccagcccagccctctcgtgtggcctgaccacactgctcacacttggatggggggagccactccagcggggagtaaggtggcctgaccactgctcacacttggattgtgggagccgctgcagcagggagtgaggtggcctgaccactgctcacacttggattgtgggagccgctgcagcagggagtgaggtggcctgaccactgctgacacttggattgggaggagccgctgcagcagggagtgaggtggcctgaccactgctgacacttggattgtgggagccgctgcagcagggagtgaggtggcctgaccactgctcacacttggatggggggagctgctccagcagggagggaggatgctcagggtgaatgctgcctctgactggagccccctggggcccgtggctttttcatctccagacagagtgcttgatactgtcacaagtctcttctacatctctagccccgtgtttcctgtgtcgctgagaccacctgcctttctcttacactccttctcttgcaaactttggggaaacaggcaccccacccgcaatctcttgccttgttgttgccatgggaatagtggtgccatgtgctcctgcgtctctgggcttggggtcttgaatggctgaggataaaaattacccatgggctggcaaagccagtccatccccatgaggggccaccttcctccatcctgctcgtccccaggaagcctttgggcattcctctccaagccttagatgctcccactgggaatttcagaaggatgttgggggaggagggcaatggctggggacacactcaagaagaggaagtttcttcccactagggctggtgacaggagcattagcacatgtcggcgggcccctctgtgtttctctgagttccctaaaatctcagctctgtctctgttctttccctatcgacaagaataaaaagctttgtgggtgaagttgattctgggagaggcctcctgtccagagttggtgagtcaggaaagcactgcagcattttctcttgcttaggagaagagggtgaggcaaagcccctccctccctagcctccttctcctactgcctccatcctccgttagggtggagaagtatctttcacgccctgctctaactttcagactgtagaaagtccaagccagagaggctggaacagaacataaatgtttctccctcatctgtcttgagtttttatgggaggagacccttcgcctttattgagcctgtaacttggaagtccactgtaggtggtttttctgttggccatgatggctcaggagcgctctctgtccactcccatgagcagcacattcactgaggtgtgtagccacaatgaggggtacttgctttttttcttttctttttttttttttttgagacggagtcttgctctgtcccccaggtgggagtgcagtggcacagtctcggcttgcctcccaggttcaggcaattctcgtgcctcagcctcctgagtagctgggattataggcgcccaccatgacacccagctaattttttgtatttttagtggagatggggtttctccatgttggccaggctggtctcgaactcctggtctcaagtgatccgcctgcctcggcctcccaaagtgttgggattacaggcatgagccacagcgcccggctgaggggcactttgtaagatagaaaacagtcgggccggg[138 bp omitted]ggtggtggatgcctgtagtcccagctatccgggaggctgaggcaggagaatggcgtgaacccgggaggtggagcaggcagtgagccgagatcgcgccactgcactctagtctgggcgacagagcgagaccctgtctcaaaaaaaaaagctgtgtctcctagagtcaagccctctctacgctccaccctctgagcatagactcagatccctctgtcccgcagggtcggcatgtcaagacggggcagctggctgccatcaaggtcatggatgtcacggaggtagggagtggagctgggcagtgggagggtcggaccagcgagaagggagtgttgggggagtctcagggctcagctcctcccatctgcttaggacgaggaggaagagatcaaacaggagatcaacatgctgaaaaagtactctcaccaccgcaacatcgccacctactacggagccttcatcaagaagagccccccgggaaacgatgaccagctctgggtgagaaacgcccccctgcccgccttccctccccgcaatccctgtctccgggctgttcactaggactcagtatcagtgcccagcatctctccttgccagctaccctccctccggtctacccagcctcccctgtccctggacccagaggggcctcctgcctcatggatggccccgcactccagcccccatgaactgcagcatctcatcctttgagtgttttgtggggaggggtcctggcgtttgccccaacccttcccctaaccagtgtctcacactgtgcgatcggctcttaataaataaatataatcctggcaaaggggagagagaccgtggggaggccgtccatccattttcctgcctttgagcacagctcctgggaaagcaacagaaccaaaatatttgtgggagataacagggcccagacccctcccagaaccccagatgctacagagcacccagcccttctgggtcatcattcaaaacagagcctgctgcagagcttggggcctcccccaaattcctcctgcctggcccagaacattcctaagagtcattcccctccctagcctgggcactggtgctgacatgttcccccagcctcaccctttgtggtactgagcccagtccctgaggatggagcagcagggagtgtggcaatggctgtcgggagttttggcgctgacgccaggtctcccctcccaacagccattcagagaagcacttactaagcacttctgtatactctgtatagatgagcatgagccatggtcctggcctccaaggccctttggctttttgggaacacacacactcatgcacacaaagaaagggagaaaggtgacagggaggtctacctgccaggtgtgtgtggtggagatcgcggcaggctagaggcattagtggccgggcgcccccttctggacctgttgggcacaggtcctcccctcctctcactgtgctctgctctccaaggaataggcacatgcaaattacttttattgcatatgcaaatatatgtgtccacccaaccttttcctgcattggatgtggcttttagtgaaaacttggacaagcatgctgatttccaggaagactggttggagccatcttctctgcctgcgggtctcagctgctctccctgggaggtgcagacccagagccctcctcatctcctggccttgttactctctgtgctggaggagtttctctcagggtcttcccaggttccctgttgcagctgtcgaggtagaccctatgcaatctttatgtctctagcagacctagagaatcactatttcttagccccctttctgcttctaagtcagggactggcaaacttcttctgtgaagggccagatggtaaatatttcaggctttgcgggtcatatttgctgtcccagctacacggttctgttgttgtaccacgaaagcagcaatagtcagtacgtaaacgaatgagtgtggctataaccccagcaccctcactgcggtcactcacgtttcaatgttttacactttcacatgtcatttaggattcctttttttgttttttcccgcaaccatttaaaaatgtaaaacccaggccagacgcaatggctcaagcctgtaatcccagcacttcgggaggctggggcaggaggatcacctgaggtcaggagttcaagaccagcctggccaacacggtgacacctcgtctctactgaaaatacaaaaattagccgggcgtggtggcatgcgcctgtaatcccagctacttgggaggctgaggcaggagaatcgcttgaacctgggaggcggaggttgcagtgagctgagatcgcgccactgcactccactctgggcgacagagtaagaccctgtctcaaaaaaaaaaaaaaagtgaaaaccattcttgacttgctgaccatatagaagcaggccttgggccagccctgatccaaagcagaagttcctttttttttttttgagacagagtcttgctctgtcactcaggctggagtgcagcggcgcgatctcggctcactgcaacctctgcctcccaggttcaagcgattctcctgtgtcagcatcctgagtagctgggattacaggtgcccaccaccacgcccggctaattttttgtatttttagtagagatggggtttcaccatgttagccaggatggtctcgaattcctgacctcatgatccgcccgccttggcctcccaaagtgctaggattacaggcatgagccactgagcccggcccaaagcagtagtattttgttttgggttttttgtttgtttgttttttgagacagagtctcactctgtcac[134 bp omitted]tttttttttttttagtagagacagggtttcaccgtgttatccaggatggtcttgaactcctgaccttgtgatccacccacctcggcctcccaaaatgctgggattacaggagtgagcctccgcgcccagccataaagcagtagttcttaaccgctgtagggtttggaatcccaatgagaatctgatgaaagtactagacccttcctcagggaaaatgcatatacctgcatcattttgtttacagtttcagggattccttggactcctactctaaacccagccccaccctgccagttcttttccatctgtattccttctcctcttttttttttttttttttgagacggagtcttgctcaccatgttggccaggctggtcttgaactcctgacctcaggtgatccgcctgcctcagcctcccaaagtgctgggattacaggcatgagccaccgcacccagcctttttccctctctgtcttgacttgaggaaatcctgtggcctttgtgaggcttctgtggcccttgctctctagctcataccagttctaaccccaaggtctcttatcctcctccaggagtctagcaggggattggggcaggggtgggagggcttgtctgactgatacttttcctttcggtaccttcctgggatcctagctggtgatggagttctgtggtgctggttcagtgactgacctggtaaagaacacaaaaggcaacgccctgaaggaggactgtatcgcctatatctgcagggagatcctcagggtgagctcaaggcccctccccttgtcttctcctccgctaccctggctggagtttctccatgagcaaagatcctccctgcgctgggaggagacatcactgccctctttagggagcagcaggcctgatgcgggtgggatgtggaagcagggtccacaccttgggaagtctcaggctgttggaggagacaagctcctgtttccaagctctgccgcttctccacctgtaaccctgcaactgctgggaattcacctggagccacctctctgaggaagctctccaggacagctcagcttgcttgggctcctggtggagaaggtctgctccttcagcccagccctgtccagactgactgctccttgtcccctcaactcactccccacttactctttcctaccccatccaacaccatggctaattttccctgctctcctgtcccagggtctggcccatctccatgcccacaaggtgatccatcgagacatcaaggggcagaatgtgctgctgacagagaatgctgaggtcaagctaggtgcgccggctccttctgaggctgacgaggacctttcacctccagaacagagaatgaggggcccctttttctctctggtggctcaggcccaactcccttcctactggggaggctcactccctcccctttcccctctccccctggaatgccctgcctcctgctgaaaatccctcaggaagctcttcacctgtcacctgttacgggccaggtgctctgcaggttgctctggggagatgggatctgatggccctcctgcctgggatgctgtccgtgatccttttacctgggtttttctctaagatgctggaagatggaatcgggttcttcaggatggtggtggggtaaaggagggtgctggggtgtctgggtcgggccaggaccacagctggctcaggcaagtcctgtgtgtgcacgcagggatgtgaggcaagggagcagaggtgactccccacactgacccctccctctgtgtcttcacagtggattttggggtgagtgctcagctggaccgcaccgtgggcagacggaacactttcattgggactccctactggatggctccagaggtcatcgcctgtgatgagaaccctgatgccacctatgattacagggtatggagtggaaagttgggagcatgggggctgccaagggcgggaagcaatatggggaccacggggcctgagcaggctggggaacagaggaaggtcagatgatgttagcagtgaggggctggggaacatcttacggcaaggcaagtgtgggtgggaagatgggatgggttggaaggcactgctgcaggaatgggtgtggcccaggaaggctcctgagaggccaggatggtgggtgaagagaggttgcagggcagagttgtcaggaatattcacttgttccttctttcccgtctatagagtgatatttggtctctaggaatcacagccatcgagatggcagagggagccccccgtaagttctgagtctgccgggagtgggaggggagggaaaggaagggcccagagagtggctgtagggaggaggtgggtcctgggaccctgccgaggaagggtcctgtagctcccagtgcagtgaaagggactgagggtgtctcctctgtgtccagctctgtgtgacatgcaccccatgcgagccctcttcctcattcctcggaaccctccgcccaggctcaagtccaagaagtggtaggtctctgagagtgtgggctctgggaaggaaggtccctggacaaggccatccccaccttcatgccctctgtgctcaggcttggatctcaccagagaagagattctggggggcagagggcggtgactggtgttgggatatgaagacaggagggacgtcaaggtggcttgtggatgaatgatccaccctcttcctcctgcacccatcccttctgaggggaccctcccagtgtgagccaccactgtttccaggtctaagaagttcattgacttcattgacacatgtctcatcaagacttacctgagccgcccacccacggagcagctactgaagtttcccttcatccgggaccagcccacggagcggcaggtccgcatccagcttaaggaccacattgaccgatcccggaagaagcggggtgagaaaggtcagtgggcaggctggagggggcaggtactaggggacactccagcctggctcctctctgccagccctgctcgctcctggcaccccttcctgctcccctccttggccccagctctccctgtccaaggagatcgttctcaaacttgcaacccccaaggggttttccctcctttccctcccagtctgaatcagccttccaaaggaggaccggcctttcgcatccttacaaaaactccatgctaagcacatgtgtgtgcgagcacaagcacaggctctgccacacctcagctgccctgggacccagtcccggtcctgtccaggcccacacctgagacccgctgtcctcccattgcccccaggaagtgggtggggcccctcatgcttgcccagccagagagacctggttatccccacccaaggtttccctagcccacggcgggtctggggcgctgggtgagataactgcagtggcctccccctgcagaggagacagaatatgagtacagcggcagcgaggaggaagatgacagccatggagaggaaggagagccaaggtaggcctggcaggtggagtgggggttggggcggtcatcgctgagtggggggactacagtggtgcttggctttggggactctcagcctgggggtggtgggcacagagaggtagagactcctggaaaccaaatttctgagtgctaagaagtggaaccaatgactgagcaagagctggggagagagcaatttgtggtgaatgtggggcgcagcagtaataggaaaggaggacaggactgaagactgggcagaaggggacggtaagtctcctggccacctgggagtggccagaggcagaggctttgatccagttaaagcacccactcaggcgggcccacggggttgagagtgggaaccaacagggttctgaccccagtgcttctttgtgccacccctgcccagctccatcatgaacgtgcctggagagtcgactctacgccgggagtttctccggctccagcaggaaaataagagcaactcagaggctttaaaacagcagcagcagctgcagcagcagcagcagcgagaccccgaggcacacatcaaacacctgctgcaccagcggcagcggcgcatagaggagcagaaggaggagcggcgccgcgtggaggaggtgggctgtctccgaagggcccaggcctggcgcggcctcctcctgacctgccccgggtccattagggccttggagaacaggttttaaaatgccttaaatgaatggcatttctgttgaaacaattatatgatttcaaatttcatgatgagctggacttaacacaaaatgtaatcccatcactttgggaggctgaggtgggtagatcacctgaggtcaggagtttgagaccagcctggccaacatggtgaaaccccatctctactaataatacaaaaattagccaggtgtggtggcgcatgcctgtaatcccagctactccggaggctgaggcaggagaattgcttgaacccgggaggcggaggttgcagtgagcagagatcacaccactgcactccagcctgggtgacagagcaagactccgtctctaataataataagcaataacccgcagcacccacactgtccacctgctacctccaaagtaggccctctcattgttgaacaaaaaataatttgcaagaa[135 bp omitted]taatatggtgaaaccccatctctactaaaaatacacaaattagccaggcgtggtggtgcacgcgcctatagttccagctacttaggaggctgaggcaggagaatcgcttgaacctgggaggtggaagttgtagtgagctgagatcacgccactggcctggggaacagagcaagactccgtctccaaaaaataaaaaaataaaataaatatagcgttcagatagtatagtaacaaagtcctatcttttttttttttttttttttgagatggagttttgctcttgttgcccagggtgacgagtgcagtggcgcactctaggctcaccgcaaaacctccgtctcccaggttcaagtgattctcctgcctcagcctcctgaggagctgggattacaggaatgcgccaccacgcccggctaattttgtatttttttcagtagagacagggtttc[132 bp omitted]ggagaaggcctgctggcaacttcattgcagaagtaggcacaagttccctcaagtgtaagggtccctcagggtttgtgcttttgttggtggtggtggtggtagacttcgtgaaagccaccacagaaataccgtgaaagtaaagtaccacctgggcactggtgcttgtcaaggagtgggccaggtccctcttttctgtgctttctgtgcacgggcacctggtgccctcttgtggccaaaggctatcactacgacccgctctatatggacttcaggcaaaggtcgattttaggctaggagtgctggggaggcttgttttgagttcggctttggtttgttgtttggtggggtgtggggagtggaaggtgttgtctagctaagcccaccccacaggcagcagtcagtctcacagcctctctcgtcacagctaccggctgtttacccgagcccagccccgcgggcccttgggtggggatgggtatagttgcagaaacaagcggaagccggtctctcttaccaccctccgtggtgagcaaggagggctcccctccctgtccatggaggggcagtgctgacgcgatgtccggtatggttcttaagaccacctggctctccccacagcaacagcggcgggagcgggagcagcggaagctgcaggagaaggagcagcagcggcggctggaggacatgcaggctctgcggcgggaggaggagcggcggcaggcggagcgcgagcaggtagagcgccgcacccgcatccctgccctcccgccctcccgctcctgctgcctgccgcccctgctccccgtgcccttcccccttctctcccccacccccagattcctcctatcttttctagcttcactctttctctctgttttctcccacccttcaaccccaaccctgaccccctccctcttccttccctgcctcattcccatctctttaccccatccctgactccccgaccccttcctcatcccccctcattccctgtgccctcttcttccccatctgtgccgcatggccccctggggctcatgtcatcccctcccctacctctctcttactcttcccctgcaccccctcattctcctgcggatcccttcctccttctccaactcgctgctgctgccctcctctgcctcttcctccttccctgccctctgccccccaccccacaccccgtcccccaggaatatattcgtcacaggctagaggaggagcagcgacagctcgagatccttcagcaacagctgctccaggaacaggccctgctgctggtaacgggtccctcagcgtcctctgggaagatgcttttcagagcttctttgctggaacgggatgggaacacttcaagggaagggattcacccaggacatcaagggaatacatctcctctctaggcagttggagaaaagagagggcatgcctgctctaactcccagggccacaccctgctgagccctctctccctacccttgggcccaggaatacaagcggaagcagctggaggagcagcggcagtcagaacgtctccagaggcagctgcagcaggagcatgcctacctcaagtccctgcagcagcagcaacagcagcagcagcttcagaaacagcagcagcagcagctcctgcctggggacaggaagcccctgtaccattatggtcggggcatgaatcccgctgacaaaccagcctgggcccgagaggtactcactgcctcctttgcctcctgagactgcagtcccactgcctgaggcctggagagccacaagaagtagtagttcacagtagcaggcaccaagtaggggaaaggagcacacagcacagagcatagggcgggagtagttagggcaggtgggaccctcagttttgagaacagggaggcaagagctggcctgcttgacatcccttcacatcacaggtagaagagagaacaaggatgaacaagcagcagaactctcccttggccaagagcaagccaggcagcacggggcctgagccccccatcccccaggcctccccagggcccccaggacccctttcccagactcctcctatgcagaggccggtggagccccaggagggaccgcacaaggtgagtctctccccacccctgtcttaatgaagacacagggagctttgttcagagcacaggtacacacacacgcgcgcacacacacacacacacacacacacctgctcagccgtgagccaggattacagagcacaggctttgtggacagactcactcacctgcttcttgctgcctgtgtctgtcctgacttagctgtcatcaggctcaaggaaccccttgtccttcaatggaggaaggggcagctaaagtcctttcccaccccagaccccaattcgcaggtggggatgtgccatggagcaggcagcccaccctccctggtctctccctgcagagcctggtggcacaccgggtcccactgaagccatatgcagcacctgtaccccgatcccagtccctgcaggaccagcccacccgaaacctggctgccttcccagcctcccatgaccccgaccctgccatccccgcacccactgccacgcccagtgcccgaggagctgtcatccgccagaattcagaccccacctctgaaggacctggccccagcccgaatcccccagcctgggtccgcccagataacgaggccccacccaaggtaaggacagttctgcaggcccagggaaaagcagagagctagtcatgaagagaaggagggcagtgaaggggcaggccacatggaggaagagtgcagggcgggaagcgagagaaagccagggcgctgccctgccggggtcagccgtccagctgaggacgcgacgtggaggggtggcatcgatccctgtggggagcgtgggaacggagaaacgcccagggtgttttgggagcgctaaggggcagactttgccagttagaaccgcagctccaccatcatccggcttcataaccctggacgtattcactaactcccctgaacctcagttttctcatccatcaaagtgggggagctcacctctcagaggtgaggcttaaacatctgagaagtgcctgtcgcagcgccagctcgcagcacgtggacttctctccacaggtgcctcagaggacctcatctatcgccactgcccttaacaccagtggggccggagggtcccggccagcccaggcagtccgtgccaggtaatgcctgggtagggcaacgcctgggtgaggtctgagggcagcctagggagtagggggggcacagggactttaccagcctacccgcctgggggtgggaaagccccagccccatcacctcagcgcccccccgccgccccctcggcacccctgtgctcccttcacagacctcgcagcaactccgcctggcaaatctatctgcaaaggcgggcagagcggggcaccccaaagcctccagggccccctgctcagccccctggcccgcccaacgcctctaggtaatagagttgtcccccaactcactctcacctctcacttctgccacccgcttccctggtgatggctccctctgcagtgcagctcagcaccccagagaagggagcaccgtgcctccctgaccctgactctgcccccccaacagtaaccccgacctcaggaggagcgaccctggctgggaacgctcggacagcgtccttccagcctctcacgggcacctcccccaggctggctcactggagcggaaccgcgtgggaggtatgtgagccagggctgggcagcctgctctgggcctgggggcttatcaccatggaccctgcctttggtggctttggactggggcacccacacggacagggaggacctgtgtgggtatggaacttggggctgagttctggggctcagggtgtgggcttgaggccatcccttgttcaggcatcagtgaccttcttccaccctgccgtccagtctcctccaaaccggacagctcccctgtgctctcccctgggaataaagccaagcccgacgaccaccgctcacggccaggccggcccgcagtgagtcacctggtggcaggcatggcctgcctcatcctggtttggggcttagcctcagggtgctgggtgtcaggggtggggtctccgctgatctaccgagaagggctgtggggatggagggactggtgcttctcatggtgctaacctttcctaacctctctcctaacctctctcctaacctctcttctggctctttcttcccctgcggcccctcccagagctataagcgagcaattggtgaggttagtgagatgggcctgcttgtgggagcccctcctgtcgccctgctggggtgtcccggcaccctttgtctacctccacccaggcccagcttctccctgcccctcacgtggctcctccctgcaggactttgtgttgctgaaagagcggactctggacgaggcccctcggcctcccaagaaggccatggactactcgtcgtccagcgaggaggtggaaagcagtgaggacgacgaggaggaaggcgaaggcgggccagcagaggggagcagagatacccctgggggccggtacggcatcgggagtggggccctcccactccaaggcacagggagggaggggaagtggcagtggggaagaggtggggctttggggcaagtctgagggagagcggctcccttctctagagagtggggtgagggtgcaggttcctgtctctctcccgctgccctgtgtgttgtggggtggcctcttcaagtgcctgtctgcccctgtgccagcctgccctgtgtgccatgcagggaagcacctcacggtggagcaggggctacaccgtgagggtggagcaggttgtgttttgaatagagacaaaagcctgggctctggctgccatctgctgcctttggcacttctgtggccacgggcaggacctggaggggccccaccttcctctctcacagcagcgatggggatacagacagcgtcagcaccatggtggtccacgacgtcgaggagatcaccgggacccagcccccatacgggggcggcaccatggtggtccagcgcgtgagtgagcctctgctccctcccctgtacctgtgtgtgccctcctcagccccacgccaaccctgccctctgtcctgtagacccctgaagaggagcggaacctgctgcatgctgacagcaatgggtacacaaacctgcctgacgtggtccagcccagccactcacccaccgagaacagcaaaggccaaagcccaccctcgaaggatgggagtggtgacgtaagtgggccggaggcaggtccgccgggagagaagagccctggcgatgggcaggaggtcccggtgctgggtaacggcagaggatggggcggagcgctgggagctggacagcgggggtgccagttggggagctggagcctggggaacagcagcaggggcagggccgcagctggacttgcacttgtttgcctgactgctgtccccctaccacagtaccagtctcgtgggctggtaaaggcccctggcaagagctcgttcacgatgtttgtggatctagggatctaccagcctggaggcagtggggacagcatccccatcacaggtgaggacaggaggacagacctgctgtgaggccagggtccaggggcagcctggaggggagcacagtggtcttgagacgcagcctcacaaagcatagccacaggacctctcccttgggccctagcacctgcctgggcacagaggcaaggaagagcctctgagacccctccttcctgtcccacaggacaggaaatgctcagagttgccaggggacctgggcaaagactcaaagctaacaagtgacagaaatgggacttgagccagaccttttgactccaagtccagcactctatccccctctcccatgcacctcctctcctcctgtctttctcctcctttctgcgtattatgaggtgccaagacctgatataggggatggaggtaaaaagagatggggtgagaagctgcagcccctcctcccacctcctcctccttctggcagccctagtgggtggagagggcactcggctcgaccagctgcagtacgacgtgaggaagggttctgtggtcaacgtgaatcccaccaacacccgggcccacagtgagacccctgagatccggaagtacaagaagcgattcaactccgagatcctctgtgcagccctttggggtaagccagggcagggacagctgaggaggctctggcgtggctcttgtgctcctggttaggtgagggcctggctgagcctctgacctgcccaagggctcctgttgcaggggtcaacctgctggtgggcacggagaacgggctgatgttgctggaccgaagtgggcagggcaaggtgtatggactcattgggcggcgacgcttccagcagatggatgtgctggaggggctcaacctgctcatcaccatctcaggtacaggtgtggtgagtgggggagggaggaggggctcagctccttggcgctgtcaccatcttctgcctgggaggagggcaggcactggaaggtggggccacactttctcaccccttgtggtatgctgacagaggaggccagggcggtggcattcgggcctcagatgagaatgggggcgggtgtgtatgtctgtccgtccctcagggaaaaggaacaaactgcgggtgtattacctgtcctggctccggaacaagattctgcacaatgacccagaagtggagaagaagcagggctggaccaccgtgggggacatggagggctgcgggcactaccgtgttggtgaggatgtcccaacagagtggccagcgcatacttgttcatgaagagagaaatggatctgggagccagggacttggggcctgggtggggcagtgtagtgacagaccacggggaggcgcccgtggcgcaagaagggaagtctcagcatccctcttctctcccgcccccagtgaaatacgagcggattaagttcctggtcatcgccctcaagagctccgtggaggtgtatgcctgggcccccaaaccctaccacaaattcatggccttcaaggtaatcccagcctcggtccctaacaccatctggagtcccagcgcctctccccgtgcccctgagccctcctctcctccggttctctgcagtcctttgccgacctcccccaccgccctctgctggtcgacctgacagtagaggaggggcagcggctcaaggtcatctatggctccagtgctggcttccatgctgtggatgtcgactcggggaacagctatgacatctacatccctgtgcacgtgagcttggcggggctgctgggggagtgggatggcccagtctgggcaccagacacggagactctagtccccctccttctccccagatccagagccagatcacgccccatgccatcatcttcctccccaacaccgacggcatggagatgctgctgtgctacgaggacgagggtgtctacgtcaacacgtacgggcgcatcattaaggatgtggtgctgcagtggggggagatgcctacttctgtgggtgagtgagctgccgccctcccagccacatgccccgaggtggccccggggtgcagcctgctcagcccctcacctgttccccacagcctacatctgctccaaccagataatgggctggggtgagaaagccattgagatccgctctgtggagacgggccacctcgacggggtcttcatgcacaaacgagctcagaggctcaagttcctgtgtgagcggaatgacaaggtgggaggctccttccctctgaaagccctgctgtcccggctgccatgaccctaggcccctgggcagagttctggggagaggatggtggtggtggcttcctgaaagcgggcccctctgggagctcagagggcagtcagccactaccactgccctgcgctcccttcagattccgaggacttcccagctggcccccagggggcgagtggtgcaccctctcccctaacatcccagcctgcctttcctccgggtgaggggcactgtgagtctcctcctgcagtctctgtgtctccctcaactcttctgccaccccttcttcccttctttccctctcccagttgagacacccccccaacctcagcccttggtgacttcttctcctgccccacccaggtgttttttgcctcagtccgctctgggggcagcagccaagtttacttcatgactctgaaccgtaactgcatcatgaactggtgacggggccctgggctggggctgtcccacactggacccagctctccccctgcagccaggcttcccgggccgcccctctttcccctccctgggcttttgcttttactggtttgatttcactggagcctgctgggaacgtgacctctgacccctgatgctttcgtgatcacgtgaccatcctcttccccaacatgtcctcttcccaaaactgtgcctgtccccagcttctggggagggacacagcttccccttcccaggaattgagtgggcctagcccctccccccttttctccatttgagaggagagtgcttggggcttgaaccccttaccccactgctgctgactgggcagggccctggacccctttatttgcacgtcaggggagccggctccccccttgaatgtaccagaccctggggggggtcactgggccctagatttttggggggtcaccagccactccaggggcagggaccatttcttcattttctgaaagcactttaatgattccccttcccccaaactccagggaatggaggggggaccccgccagccaaaacattccccccattcccgacccccctctcctcttctagcccatgcccttccccggtggagggagggagcagggagccctcactctccacgccccttgcttgcatctgtatatagtgtgagcagcaagtaacccttctccctccccccccacccctcctcaatgtagtggccttggatatcctgtttgttaataaagacaattcaaccagctcccaccatgcaggccgcatgtccttgctttctgtcagtactgtagactaggcagagagagcctccagggtggggaagaaaggggcagggtgggctgggatctgcaatgagtgagcctcatggggtgggatgggcagtgctgggccaagaaaacctagaagaaatgactgtggaagggtcagggcagcctcagccttaaacctgtgggcctgagggccaccagcactgaaggtgtttggttcccacccgctccagcagagccagaccagggaagaagagggtttcctggctacagcctccctgtgtgcaagtcctgcaaaggggtctcctgtttggctatgaaatgaatatagatagatagctcacaagctggcagccaccagagtcccgtggggctgagccttagaaaggctgggaggtcagcaaggctgaatgaagggcagtccttgctttctggaagactggcacctgagagcctatgtgaaccctttcctcctgctgacccctggactgcggccaggcctacacacgccagggaacgggcacacaccattcttgtgaagttcacaaactgcagattgatcagcagggggaagggatcataatgccgtggtggcggcagcctactttttcaaaatcaatttcctactggagatgggtgggaaattgaagtcggtgcgagctaaggctggatacacggcgcgtaggggagatcaggcactcggttgaagtaggccccgaggaagatgaggctggagcccacgctgaagagcaccagagcggcccagaagcagatgttgtcaagggcattccccatgcgcacccagtcggacacttcctggggaagggtcggcacagtcagtaaagaggcagctgcaggagccagcggcatgggagacagtggtgggcctctgcctcgctccacccgcctctggctcctgtcccacctcgccggtggcctcctgatctctcgtgctctcggccacgaagttcacggcatccacacagcagcggacctcgggggcggcggcgcccaggctctggcagaaggcagctggcggggaaaacaccggggtgggccttaggagcctcccccctggcaggcaccccgcgcggccccccgggccagggccactgtgctcacccgtccaggtcccctgccggtgcctctgcccctcaaacacgagctcgctccgtggctttttcagtatcagctcctccgcgcggagcaataagcccaccgacgacgcccgccttgggggcgaggcggcccggggggcctcgggcggcggcggggagcccaggaggcgcggcagcagctccaggagaacctggggcaggggcggggcttaggggacgaggttagtacgaagccccaccccgacccgggctgcaccgccccctccgcgcttacgtggcgcagccgcggggacatggcgtgggtggtgggcgtccgctgggacacgttgagcacgatgacgcaattcatgacaatgagcgtggcgaccaccatgacgaaaataaggaacctgaggagcccggaaggcatgacatcaccgttcctcctcccagctaccgaaggcgccgcgcgctgacctcacaaacacggcttctcctggtacgggctggttacgccctccagctgcgccccctacacgacgacagacgcgtcccccagcccttctcctgtcctaccacttgtggcggccatgaaggggacccccagctccctggacaccctgatgtggatctaccacttccacagctccaccgaggtgaggctacgcccgccaagggctgcacctcgagaccttctgggtaggtctcctgttcgcccctgtgacccctgccctgctactctactgctctgctccttctccaggtggccctccagcccccgcttctgtcttccctggaactctccgtggccgcagcccatgaatatctggagcagaggttcagagagctgaagtccctggagccacccgaaccgaagatgcaggggatgctgcctgccccgaagcccaccctggggctggtgttgagagaagccacagccagcctcgtgagcttcggcaccaccttgttagaggtggggtactggggggcttaggatacgcggcgatcgggtagcgggaacaaggacctctgcctccccgctaacccctgtgcccccaatgcagatctcagccctgtggctgcagcaggaggcgcggcgactagacggcagcgcgggcccagccccagacggcagggatccgggtgcagcgctgagccgggtagcccaagccgcagggcagggggttcggcaagctggggctgcggtgggcgccagcgcccggctcctagtccagggagcatggctatgcctgtgtggacggggtctgcaggggtctgcctcattcctgcgacagtcgcaacagcagctaggcctcggaatccccggagaaccggtgagctcaggacacggggtgagttaggggccagaggcggcggggctagggaggcactgagccggactgtcccccaagagagctactcgggagacctccaggtgacgtccagcagcagtgaggaggacggcggaccagggactccatccccgtaccagccccacccagcgtccgaataaagcccagggcggggcgagacagccagagcttttcccggggtctctgggttttggccacgcccccacccttcacactggccacacccccgcgggggctccggcttcacctgcccaggagcggcacgctcagagaagtctctgggattttctgggcaatgaggaacaagaagacggtctgggcgagcaggacgttgatggagaccgtgcatttctggccgccggctggagggagagccagtgagagcgggccccgcctcccgggagcgagcccgggtttgggggtaggttcggggccactgcttaccctgcgccggcaggaagtaggcgagcagcaccaggcccgagatgagcacacagggcacgatgatgttaatgacgtagaagagcggcttccggcggatgatgagcgagtagatgacgtcagtctcccctgggccgtcggtggcgccaccgtggtggcggcggatcacccccgggcagaagtcgatggcccactcgccgttctctgcgggacgggggcacggtcagctggctgtcagagcggggcgcccgccgagctgacagcgggctgaagaggaggctgcggctgtctgcaccagggtcatgggccgtcaggatgggggcaattacggacagaaaagggcattctcgttgagggtatggaaagccagaaggcaggactagagtaacaatcgagaatgatttcaggacaggggtaagctaaacccagttgtggaagtcatcctccagtgtcgttggtccggggcaagcccaccgtggaagtcccctctctggaccccgtctagaagcgggtttttctgagcaggcaggggcttcaccagtataggcctctgtgtcgatgtcgatcttgttgatggtcttgccgtcgttgtctacggcaaaagtgaactccacctcttcggcattgtacgtctgagagctgcggagccagggccgggagcccaccccagaagctctgacctgggccccggcctcaggcccagccctggaagctgggatctagcggggccgcgatcccaagcccaccccttcacccaagcccagcccgcacgcctctgttcccatctgtacctccggccgcgctggagcgtcccacccagtgcctacgcctggctccgcctccagcgcgaagccccgccccgagggcggtgcttcccggttggccccgccccataaggcccccccccaacaataatcgtccgggcctcggagtagctcttcccaccggaaaataagcgaacagttctgccaatcgaaggggaagtaggtgacctccactgcgcagacgctgcggtagatggccggaggcagccacgtcacggagccgccctcgtagacgagcacgttggcgtcgtaggccactccgaactggccatcaatactgtgggctcggggaaaccgagctttttgcacaggtctgcaccctctcagagtacccccttccccaaccaagtccagcccgcaccccaggccggcttccctccagcctggcgtctggcccggttctcacttgttttccagcacaatctctggcagccacacgagttctgaagggactcgcagggtttctatacccccaaagtcgtccttgctgtagttgagtcggtaatcctgccaatcctaaggggtgggggatggaaggccgcgtgccctgcatctcccacctggcgctgcctgggaggggtttgggggaaaaggggtgccctggacaagacctcacaccattccccagatttgactcacgattccaatccagacgctagtggtgagagtctcctctttttcattctgcagatgggagatggggatgattgaagtgagatttcagggccagaagtgagctttaggacagagctcagcggttggggccagaagtgggatttttggcttaagatgagggtgggggtagcttaccagtgagatgagattcgtcagggtgaccttgaggctgatggtgacagtatcctcaggctcccgcactggccggcttcctgggtcatagttgttgaagagatggtgataaagacgcagttcctcgttcttccccacacccctgcctgcgatggggtcaagaaggaagggtcattggcaatgaagaggctggagcacctctctcccctctgcctcccctgggtcctcacaggcctctgaggctgtgtactatcagtatctgtctcctaaaccaattatgctgtgcctgggaacgaaatactgtgtctaagtctccatcttggtctctgtctttgtcttcccagtcccttcatgtcagtatctgtgtgtgtccaattgcccctctagcccctgtccgtaccgagaagccccaagaggagcaggaccccaagcggagcccttgccatcctgctgcgtggttctcagggttattctgagctctggcaggcttggagggggcatgccagggtgcctgtgtgagggggaggagggtgttagttccgggctgttaggggactgtcacctaatcctctgctcacccctgctgcagctggggacattttggctgcttccagaggcagctgccccatcctgtgtttcctgcccctgccccgccccagcccagcgtcctttgcctggtatttggccaactccccagccacagatgtgggcgtctcctgagaggcacctgcaaccacaattctagtagcagggggtgggagacactgctttcagcaggcactgttgtcctttgagtaagctgccctgtgtaggtgaccctgactgatgaacacatctggggatgtgacacaccccttgcctcccattctcacccatgtggaacacacactatcaccacccaagctcacaatgcctttcttgccgacagagtggcaaaaaacagtctccataaagacctgataaagagacaggtggtcacaggggattagccctgcggtacagagattccatctagcaaaggagatcatgtaaaggacccacctccttccacaacctgatcgccaggtttgcccatgcccagcccctctgggtgggagacttgtttctccttgtctatccctgctgccaccttgtggtcacagatgatagtaccgtcttcccatcctactctcctaaacacacacgtgcacacatacacacacacctgatgacaccttaatagatccttttgatgttcctttttaaaaaaaatttttttgagaccaagtctcgctctggcgcccagactggagtgcagtggcatgatctcggctcactgcaacctccgcctcccgggttcaagcgattctcctgcctcaacctctggagtagctgggactacaggcgcatgccac[135 bp omitted]gcgcccagcctcgatgttttttgtttttctgtttctttttttgttttttgttttttgcagggggtggggggacaggatctcactctgtcacccagacaggagtacagtggcaccaccatagttcactgcggctctcaaactcctgggctaaagcgatcctcctgcctcagcttcccaaagggttaggattacaggtgtgagccaccacgcccggcctcagtgttttttaaagccttcttgaaccattctaatcacctggaggggtgcttattttaaattcagattcctaggctccattcccagagaattatgatttcgggactagggtgccaggaatctgtatttttaggaaactgtccaggtgttcctcgtgaggtaggaggggctggcctaagcatattttctgcttacatctcatttcctcacagcagtccagcaaagcaatgatcactgtcctgaatacatgaaaggggatgctaaggtcgggatccagggtcacacaagtagattggcaataatgcatgagacttatcaatcaactctattgatctcgcacacctgtgtttattttacccttcacaaaacactttcgggtccatcacctttgggtctccttcccccacctatgaggtaggtcataatcacctccatgttacaagcgaggacacatcaaataacagagtgtcctcctagtccatttcccacacttgtgtaaagcctctgtttccactgctgccttatcaaccccacgatttccatttcagactccctttctgggtctctttgacccagcttacctctttgcatgtggctggtacatggactaagtctcaaatctgtgctgctgcttattccagagcttccgcgtcaaggcttgggacaagaattgtgataaatgcaaatatttattcaaacatcagtggacacctacaaagttcccccttacagggccgagtgctacggttattgagatggataaaacaagcctcaaggagttatcatctaatgacagagacctatcaacagccagtgatgccagactatgagaagcataaaaataaacaggtgctatagaatctgtagctagggtgaatcagatctgtcagaaaagcaaggttttggccaggcacagtggctcatgcctgtaatcctaactatttgggaggctgaggctggagcatcacttgagcccaggagttcaagaccagcctgggcaacacagtgagaccccccatctctacaaaaataaataaacaacaacaaaaaatattagccaggcatcatggtgcatgcctgtagtcccagctacttaggaggctgaggcgggaggattgcttgaccctaagagatcaaggacacagtgagctacgatcacactacactccagcctgggtgacaagcgagaccctatctcaaaaaaatgaagtttccggctggatgcggtggctcaacacctgtaatcccagcactttgggaggccaaggcaggtggaccacctgaggtcaagagttcgagaccagtctggccaacatggtgaaaccccatctctactaaaaacacaaaaattagctgggtgtggtggctggcacctgtaatcccagctactcgggaggctgaggcaggagaatcacttgaacctgggagacggaggttgcagtgagccgagatcgtgccactgcactccagcccgggtgacagagtgagactccatctcaaaaaacaaaaaaatgaagtttctcctaggtttcctgtagtcttgcacatggactggaacttactagaccagtgtcagaggccaaggcagctccagagcctgtctcctgatctgtctctgccgctctgtccgctctctgctcctctcacttcgtcagcactgcccattccccctactttgcatgtcccctttctactgtgtagtttctgctttctcgtcacctgtgcatcatttcaccatggtcttagccccagaccaacttcttggcttctctctgcagaggcagcacttttgttcccgttgctactgcctgatgctctgagggcttggggtgccaacactgaagaaggatcatggggttggcctaagactgccttgtttaggatggatagtgggtgtggcaggccctgacaccacatgtctggtaattcaccctctagcaacccagcccacttctcctatatgtttagctcccaaaacggcctgccaggatgccattctcactgctagagctgaaatatatacaaatatatgaaatatacataaattaatacagttaatataaattcactctatcctccccagcaggattcaaacttgaaatcttgcttcaaaaagtgattatgagaaaaaaaatctaataatctgatcaaaaagagggcagaagatttgaatagacgcttctcaaaataagacacacaaatgccaaacaggtataagaaaacgtgctcagcatcattggtcatcactgggaggctgaggtaggagaattgcttgagcctgggagttcaagaccagcctgggcaatatagtgagacctcatctgtaaataaataaataaaattttaaaaaacagatgaatggtgagccaagatcatgccactgcatcctagcctgggaaacaagagagaaaactgtttaaaaaaaaaagaaaaaagaaaaacacagatgaatggataaagcaaatgtggtacatatacacaatggagcaccattcacccataaaaaaggatgagatcctgtcatttgcaacaacatgaatggaactggagatcattatgttaggtgaaataagccaggcacagaaagacaatcattgcatgttctcacttatttgtgggagttaaaaatcaaaacaattgacctcatggacatagagagtagaaggatggttaccagaggctgggaagggtagtgggcaggtaggtggatggtggggatggttaatgggtacaaaaaaaatagaataagacctactatttgatagcacaacagagtgactgtagtcaataataatttcattgtacatgttaaaaaaaacttaagagtgtaattgcatggttggtaacttaaaggataaatgattgggggaattaaaaaaaaaagtgattatggcaagggtccttcaagaaaacactccgggccgggcgcgggggctcacgcctgtaatccctgcacttcgggaggccgaggcgggcggatcacgaggtcaggagatcaagaccatcctggctagcatggtgaaaccccgtgtctactaaaaattaaaaaaaaaaaattagccgggcatggtggcgggcgcctgtagtcccagctactcgggaggctgaggcaggagaatggcgtgaacccgggaggcggagcttgcagtgagccaagatcacgccactgcactccagcctggtgacagagcaagactcagtctcaaaaaaaaaaaaaaaaaaaaaaaacactctcagcccagagtccagtgtcccctgctctaagtagtttcactcaggtctgatttccatccattctccaaatgatgggctaaatcctcaacttaagcaccacaactacatcatgtataaacaatacatcacacacacaccccacaacatagaaaatgcaatagtgggctgggtgaggtggctcgtgcctgtaatcccagcactttgggcagccaaggcaggtggatcacttgagatcaggagttcaagaccagcctgacccacatggtgaaacc[132 bp omitted]cccgtctctactaaagatacaaaaaattagccaggggattacacctgtaatcccagctactcgggaggctgaggcaggagaatccccttgaaccaggcagtcagaggttgcggtgagcctagatcgtgccattgcactccagcctggtgacagagtgagactctgtctcaaaataataataataataaaatgcaatagttaacaaaactacatttgagccaacaacctgcataggagaggtgcgggttacagtgagtagaaatcctcattcctggaaggctgcagtggccatgggcctcacacatagaccgcattcacctgagagccaggggctggagctgcaacttgtgagtgaccagtgcatcccaggggcttgccttgctcctcatgctggaggagtttccggaaggggctcttgccacttcccacatcacagcagtgcgttcctgccagtgctgggagcaaagctcagccaccgttcctgccagcgctgggagcaacgctcagccaccgtctttgtctaggtttggtttgctcacagtgaggactgcctcgggggctgagacttcctgccgagttagtggagtcaggcacaggcctgctagccagggctgatggttcgtattttcataatgaaaattccccagaacctgaatgggctgcctgacaattcccctacacacacagacacacagacacacagacacacacacacacacacacagagacacacacatacacagatacacagacacacacacagacacacagagacacagacacaaagacacacacacacacagacacagacacacaaacacacacagaaacacagacacacacacagccacacacacagccacggacacacacacacacacacattcacagacacacgcagatacacacagacacacgcagacacagacacatagacacgcaaacacagacacacacacacacccagacacacacacacacacccagacacacacacacacacacagacccagatacacacatacacacagacacaggcatggacccacacacacacacagacacacacacagacacacacaccccgggatgctttgacttccaagtaagacccaaaagaactagctcaacaggaagccactcccgtcgcctgccggcttctggctagcagcgcagaacagctgcagctgactccagcggccaggctgccaggccgcggcctctctgccttcagtgccctcacagcacaaatatccccaggctggccagaggagggccccctctccactccacacaaagacctgctcttgatttgtggacagaagtaggttcagctgaaccagagcagggaggtgtagtagacccggatttctattttctttttttcgagacggagtctccctctctggccaggctggaatgcagtggcgcaatctcagctcactgcaacctcccgcgttcaagcgattaccctgcctcagcctcccgagtagctgggactacaggccgcaccaccacacccagctaatttttgtatatttagtacagacggggtttcaccatgttggccaggctggtctcgaactcctaacctcaggcgacccacccgcctcggcctcccaaagtgctggaattacaggcacgagcccgtatgagggaaatacatgaagtcacgggtgctttatcttccagcaccttcccttcttctgagaactgtccgtctccaatcctgtgggcccagaggatctgcctggaacggagacagcccacccctggccagagtggactggtctcaggaggacacctgacccaagccaggccaaagaaagtcccttccctgggaatgttctcaaacaaaacacaggaaagcagtctgtctctgctgccacaagctatgaaacctggatgcatgggctgccatgttcattcctcgttttttacgtgtgtaagagagaatgcagctgagacgcagacgagcagagacaagaatgcgcctcagcgttcccgccccgccccaggaatacctgaggcccagcagagctgctacaggctggctgcccacaagtcctttgatggaatgaggaaactcagcctctttccaatatatctcccttttcttggcttaatatatgaggattttcagggagggcagggtggctcacgcctgtaattccagcactttgggaggccgaggtgggcggatcacgaggtcaggagatggagaccatcctggctaacacagtgaaaccccgtctctactaaaaatacaacaaattagccggacgtggtggcgggcacctgtagtcccagctactcgggaggctgaggc[145 bp omitted]cccagttactcaggaggctgaagtggaaatgggggagaatcaattgaacctgggaggcagaagttgcagtgagtggtgatcctaccattgcaccctccagcctgggtgacagagtgagactctgtctcaaaaaacaaaaaaaaacaaaaaaaaaaaaaccaaagaattttcaggtcaggggtggtggttccaacctgtaatcccagcactttgtgaggtcaaggtgggaggattgcttgaggccaggagttcaagactagcttgggcaacatggcgaaaccctatctctacagaaataaaaacaaaaagaaaaagaaaagtaaagcgttccacttgaggccaggtgcggtggtttacgcctgtaatcccagcactttaggaggctgaggcgggcggatcacctgaggtagggagtttgagaccagaaaaaaaagaaaaagaaaaaaaaactgaagccaagaaagtcatagaccaaacaagaattaatgaactaattagtatctcagaggaaagaaggccttccttcctttccctagagcccaaatcagagaccataaagaaaaagaaaaaatacatcaacttctgtagggcaaaaactatgaaacgaaaggcaagcaaacaacaaactgggagaaaatgtctgtaaccagtgacatctctgctgtatttatgaagccctcacagaaagccatgaagagctgacaaaacctgggcaccgtggggaaacggtgagaaaccccgggagagaggaagatctggacttggaggagaacagcacaccagagcagaagggggctggtgcctaggaaagagatgaacaaaaatggtaaaaactccaaagtgatttcaaagagggataaaaatgtggagggtgggggagggggagatggagagaaagaggagagggaggccaccagggcggccccagggccagggctaagcactcaccctccccaggaggcaatctctccacaaacttgggtaaagaagagaaaacaaaagtccttgcaacttaccagtaca[138 bp omitted]acatggagaaaccccatctctactaaaaatacaaaattagccgggtgtggtggtgcgtgcctgtaatcccagctactcaggaggctgaggcaggagaattgcttaaacctgggaggtggaggttgcagcgatcccagattgcgccactgcactccatcctgggcaacagagtgagcctctgctgcaataaaaaaaataaaacaaataaaaaataaaaacagaaaagaaaagatctcgaatctgcttctcacttcagcgcagaggcagaagacgagaatgaatcgagaaggagaatccccatatcagcaaagaatggatgctgcgttcacgggcagtttccaccacattgtgggcttgccttcagaaagagagaaggtggtggcagagatgatgccgctgcagaagccagaagagggtccagctgatgttcaaagttcaggaggaaaggattcaatatcagagaaaaactactaagaactcccagtacctaaacagtttgatgaggtgggaatcccaaacagaaaggaggcaagaagtaattacagctgggcacggtagctcacacctgtaatcccagcactttgggaggccaaggtgggcggatcacctggggtcaggagttcgagaccagcctgggcaacatggtgaaaccccatctctactaaaaatacaaaaattagctgggtgtgatggcacgtgcctgtaatcccagctacttaggaggctgaggcaggagaatatcttgaacccaggagacagaggttgcagtgagccaagatcgtgccggtgcactccagcctggtgacagagcaagactccgtctcaaaaaaaaaaaaaaaaaaaaaaaaacagcaagtacacctgtcacccagattggagcacagtggtgcagtcttggctcattgcagcctcgacctgctgagctcaatgatcctcctgcctcagcctcctgaatagctgggatcacaggcgcacaccaccatacttggctaattttttaactttttcatcaagacagggtctcgctatgctatgttgtccacgctggtcccaaactcctgaggtcaaatgatcctcctgccttggcctcctgagtagcatcaactgcagcctcacttcaccatggctggcttgacttttaatgctcctactaccaatacttatttatactattaatactaaaagtaaatagaagtccatttttatttatttaatttttaattttttttttttttgagacagagtctctgttgcccaggctggaatgcagtgacgtgatcacagctcactgaaacctccacttcccaggttcaagcaattcccctgtctcagcctcccaaatagctgggactacaggtgcgcgccaccataccctgctaattttttgtattttagtagagatggggtttc[140 bp omitted]atttttgagacagagtttcactcttgttgcccaggctggagtgcaatggtgcagtctcggctcactgcctcctgggttcaagtgattctcctgcctcagcctcccgagtagctgggattacaggcatatgctaccatgcccagctaattttgtatttttagtagagacagggtttcttcatgttggtcaggctgatctcaaattcctgacctcagctgatccacccgcctcggcctcctgggattacaagcatgagccaccgcacctggcccgggaagtctatatttaaaaagaaagtggtatctgagttaggtggctgtcatctgtaatcccagcattttgggaggtcaaggctgaaggataggttgagctcaggagttctggaccagcctggaacatagtgagacaccccccaatctctacaaaaaaaaaattcttaattctaatgttcaaacgttgttttaggctgggcgcagtggcctgtaatcccaacactttgggaggctgaggcaggcatatcacttgaggtcaggagttcaagaccagcctagccaacatggtgaaaccccatctctactaaaaatacaaaaattagctgggcatggtggcaggtgtctgtaatcccagttactcaggaggctgaggcaggagaatcgcttgaagccaggaggtggaggttgctgtgagccaagatcatgccactgaactttagcctgggcgacaaaacaagactgtctcaaaaaaaaaaaaaaagaaagacatcagaggacgcttataaaagtgagacatgagacagagagaaaagcccaaggaggttccttatttaatgttttcaatcttctcccaatgcatggagcagctcctgcctcttagaacatgggccatgcttctgagtgcctgctgttccaaagtctgccatccagagggacagacagacattaaaacaaagtagcagaacagctttggcaaggtgccctaggaatttataatacagtaactaatccagtctagaaagctcaaaatacactttctctcctggaattgacccagagctaaagccaccaattgaccaaatgcctgctaacagtgcccatgtttaaagtccaagatcccccaggtgacagattaattagtgactctctcatgcaaaccttggatagaaacattctacttcaactatccaggctccttatcggactcaggatccttatcggactcaggatcacttccacggaaacccacttttgattccaacttttgttttgttttaggtggactcttttggttacaaagaaaaaggaataaacttaaatcacttatttatgtatacatttatttatttatttttgagacagggtctcacagagttgccaaggctgcagtgccaccattacagctcaccacagccttgacctcccaggctgaagtgatcctcccacctcagcctccggagtagctgagactacaggtccacactatcacacccagctaatttttaaatttctttgtagagccggggtctcactgtgttgcccaggctggtcttaaactcctggactcaagcaatcctcctacctcagcctcccaaagtactggaattacagccatgagccatcgcccctggcttttaaatcactttttattttttgcatttatttatttatttatttttgagatggggtcttgctctgtcacccaggctggagtgcagttgcacgatctcagctcactgcaatctctgcctcctgggttcaagcaattctcctgcttcagcctccggagtaggtgagactacaggcatgtgccactatgaccggctaatttttgcatttttagtagagatggggtttcactatgttggccaggctggtctcgaactcctgacctcaggtgatccacccacctcggcctcccaaagtgctagattacagatgtaagccaccgtgccaggcctaatttttgtatttttatttatttagacagagtctcgctccatcacccaggctggagtgcaagtggcgagatctctgctcactgcaacccctgcctcccaggttcaaggggttcttgtgcctcagcctcctgagcatagctgggattacagacatgcaccaccacaccaggctaatttttaaaaatatttttcagtagagacagggttttgctgtgttacccagactcgtcttgaactcctgtcctcaagtgatccacccgcctccgcttcccaaagtgctgggattacaggagtgagccactgcacccagcctatttttgttgttgttgcttctcggagaacagagctaacccatagacaatgtgctcagagtcagctaaatcactttttttttaaaggaaagtttttctgtcatcatgacaggaa[209 bp omitted]gaggcaggagaactgcttgaaccgggaccagggaggcagaggttgtggtgagccacgatcaacgatcacgccattgcactccagcctaggcaacaagagtgaaactctgtctcaaaaaaaaaaaaaattatcagtggatgctgcaggatataggccagagattgagaaggaacaagatatttacatagtatcaaagtatctctccacgaaagtgctccttagttacaaagtaaaaaaacagaatctccacagtggagaaacatggcggatgccaccttaaccaaaggatcaaagttaacatccccattaagggtgaaattgatataatgtgtttcctgataggacccaccaagaaagatcgctggtgtaatattcctgccagaaaaacataacccaaatacaaccttgtggaaacatctgacaaattgagggaaactctacataattactggactataattttcaaaaatgtcaaatttatgaaaaataaagacaggttaaggaactaaagcaaattaaagtgatatggccctggattggattctggacaggaaagaaaaaaagcaaaaaacaacaaccgtcaaggacattttaggacaattggctaaatgggattatggactgtagattggatgtgagtattgtatcaatgttatatttcctaaaattaataactgcactgtagtatataaggaaatgtctttgttttaggaaacacatactgaaatatttagtggtaaagaaacataatgtcttcagcttgttctcaaatggttccagaaaaaaacactcaagagggagaaagacaatatgatcaagcaaatgagacaaaatgttaacacatggtgaatctgggaagagggcatgcagttctttgtactattctggtatttttttctgtaagttttaaattatataaaaataaaatcttagcaaaaatgctaatgtctgggactcacatcgccccccagtttcttattttaatttattaattcattattttattttattttattatttatttattttgaggcagttgtcttgctctgtcacccagactggactgcagtggtgcaatctcagctcactgcaacctccgcctcccgggctcaagtgatcctcccacctcagcctcccgagtaggtgggaccacaggcacctgctaccatacctggctgatttatttttgttttcatttttagcagagatgaggtcttactatgttgcccaggctggtctcaagcctctgcagtcaagcaatcctgtctcagcccccaaagtgctgggattacatctatgagccactgagcctggctattatttataatgggggaaaaaagtggaaacaaggcaaatgatcataaacagcagaaaggaaaactgccttttactcattaaatacaataaagcattgcgaatgaatgaattatagctgtgggtacatcaatatgaatatgtcttagaaatataatgtctggccgggtgcagtggctcacacctgtaatcccagcatttctagaagctgaggtgggtggatcacttgaggttaggagtttgagaccagcctcgccaacgtagtgaaaccccgtctctagtaaaacacaaaaaaattagctgggcatggttgggcgcgccagttactggggaggctgagacaggagaatcgcttgaacccaagaagctgaggttgcagcgagccaagatcacaccattgcactccagcctaggcaactaatgttaactcaaaagtgtttaggacactggggaaaaaaatatcgtattaaatggttgctgctcttagaagtaggcccatcctgcaggtagagaccaagtggaattgcctcctggtgccctgttcagatttggtgtggcccttcaggcaaacaggaaagcctgcctggagaagccccagagagatgcctggggtctggctgcaaaggaaccaagggtctggtgctttcccatttgctagtgagaggcagggtcttgctcatgatgtgggaggtctggagcataggaaaaggccttcgggtgctgagcagctgaaaggagtgacagatgtcatcccagaatcccagaagacatgagactcacaaagcaacagtaagcaaggaaagcagctaatgcattggtaagtctaagaaagctctaactgatgttttaaaatggaagcagttgtgggagaatcaagcccaggagtttaagatctgcctggataacctagtgagacctcatctctactaaaattttttttttttctgagatggagtctcgctcttgtcacccaggctagagtgcaatggcacgatctcggctcactgcaacctccgccttctgggttcaagcgattctcctgcctcagcctccccagtagctgggattacaggcgcctgccaccacacctggctaatttttgtatttttagtagagatggggtttcaccatgtttgtcacgctggtctcgaactcctgacctcccgtgatctgcctgctttagcctcccaatgtgctgggattacaggcgtaagccaccctgcctggcctaaaaatttttaaattagctggatgtggtggtgggcacctctagtcccagatacttaggaagctgagttgggaggattgcttgatcccaggagttagaggttgcagtgaactatgatcgcaccactgcactccagcctgggtgacagaacgagaccctgtctcaaaaaataaataaataagtaaacaaatacataaaatacaatggaagtagtaatctataatttaaattctcggtgatatctcatgaaagatgaaggggtagggatagaaaacgaaacacattctaagaaccttgtcttgttttgggggcaatcaatagttattaattctagattttgatagaaagttacatttaaatgttatgttaaaaatcaatgattgctagctgggcatggtggcttacacttgtaatcccagcactttaagaggccgaggagggtggatcacctgaggtcaggagttcaggggcagcttggccaacatggtgaaaccctatctctactaaaaatacaaaaattacccaggcatggtggcacacacctgtagtcccagctactcgggaggctgaggcaggagaatcgcttgaacctgggaggaggaggttgcagtgagctgagattgcaccactgcacaccagcctgggcaaagagcgagactctgtctcaaaaataaataaataaataaataaataaataaataaaataattctgctacatgctgtttgcaagagacaacaaaaacaagttggtaaaaagctggaaaattccaggcatggtggctcatgcctgtaatcccagcactttgggaggcccaggcaggtggatcacctgaggttaggaattcgcgaccatcctggccatcatggtgaaaccccatctctactaaaaataccaaaaaattagccgggcacctgtaatcccagctactcaggaggctgaagcaggagaatcacctgaaccccgggaggcagaggttgtggtgagccgagatcgtgccattgcactccagcctgggtaacaagagtgaaactccgtctcaaaaaaaaaaaaaaaaaaaaaaatctggaaaataagagaataaattatggcataaaaatactaatataaagaaaacaaatatagcaatattaatgccaaacaaaagaattcaaaacagaaagcattaaaagggaccaagggggatatttcatctttataaaaggtataatataccaagaagctatcatggttgtagcgggctgaatgatggcccccctcaaaagatacatccatatcctaatccctgacatctgtgaatgttaccttatttggaaaaaggaactttgagatgtaaatgaattaaggacctgagataaggagatgattctagattatccaagagggcccgaaaatcaatgacaagtgtccttataagagacaggagaggagaagacacagacacacagaagcgaaagtgatataaagacactagcagagattagaatgataaagctccaaaagcaaggaaagcgttggaatgctggcagctgccagacactggaaaaggcaggggagcattctctcctagagcctccgggggaagtgtggccatggggacacctcgatttcagacttctggcctccagaactgtgagaggatacattttattttcgcaagccactcgatttgtggtaatatgttacagcagccagcaagttgactagctaatagtcataggcatttgtctatctaaaaacatagctttaaaataaagtaaaattgtatggaaataaagaataaagtgaacaatccacaattggggtgcttgattttaacatacctcgcccagaaatggacagatcaagtacacaaaaaataagaaaaagtatacaggatttgagagtatatattatctcaacagggaatacatattattttaaaatgcacatagaacataaagagaataacaaattccagaggccgggcttggtggctcgctaatgtaatcccagcattttgagaggccaaggcaagagtgttccagaccagcctgggcaatatggcgaaaccccatttccactaaaaatacaaaaatcagcttggtgtggtggtatgtgcctgcagtcccagctactgggcaggctgaggtgggaggattgctcaagcctggtaggcggaggttgtagtgagccgtgattgcaccactgcactctagcctgggtgacagagacagatcctgtctcaaaaaaaaaaaaattccagaaagtgaaaatcatgggtactagtcagggcactctacaaaaacagaaccataaccagacatggtagcacgcgcctgtagtcccagctacccgggtggctgaggcaggaggatggcttgagcccaggaggttgcagtgaaccatgatcacgccactacactccaccctgggcaacagagtgagacccaatacaaccaataggatgtatacatacacacacaaacacacacaaacacacgacaaatatttattttaaggaattggctgacatgattcatgattatgtgcgctagcaagtccaaaaccttgactagggagtcagcaagctagagaccaagggaacagtttacgtaatcctgggtccagaggtagtcagtctggaggcagaattccttccttctcaagggaacctcagcctttcctcctaagccattcaactggttggatgaggcccacccacattatgaaagataatctgctttactccaagcatactgatttaaaggttaatcacatctgaaaataccttcacagcaacatctagaatagtgggttgttttttcatttttcatttttgttttcttttcttttctgttttttgagacagactcttgctctgttgccctggctggagaacagtggtgcaatctcagctcactgcaacctctacctcccaggttcaatcgattctcctgcctcagcctcctgaatagctgagattacaggaacctgccaccgtgtttagcttttgtgttttatgtataatatccagggttttgttgtatttagcaggtggaataggtaaaagaaagtgtactccatcttcccataagcagaagtctctcagatggatttttttttaatataaactttttttctttcttttttttttttagaggtgggatcttgctctgttgcccaggctggtctgggattcctgggctcaagccgtcctcccaccatacctggcctattgtaaactttaaaatgtattgcagtttacaataaacatccaaggtatgatgtgatggataattttatgtgtcaacttggccagactaatagtagtagtcagttgtttggtcaaacactagtctaggccagtcgcagtggctcacgcctgtaatcccagcacttggggaggcaggcggatcacttgaggtcaggagttcaagactagcctggccaacatgaggaaacccaatctctaccaaaaatacaaaaattacccaggtgtagtggtgcacacctgtagtcccagctacttgggaggctgaggtgtttggatcacttgagcccaggaggcggaggc[136 bp omitted]gaagccgaggcgggtggatcatttgaggtcaggagttcaaagaccagcctggcctaccc[132 bp omitted]gaaaccccgtctctactaaaaatacaaaattagccgggtgtggtggcgcatgtctgtaatcccagctactcaggaggctgaggcaggaaaattgcttcaacccgggaggcggaggttgcagtgagccgagattgtgccattgcactccagtctaagcgacagagtgagactctgtctcaaaaaataaataaataaaatagaaaaacaaaacaaacaaacccaactcatttcttccctgaattctcctcaaaaaaataaataatttttttctttcttttcttttttttttttttttgagacagagtttcacttttgccaccaaggctggggtgcaatggcatgatctcggctaactgcaccctccacctccctggttcaagcaattctcctgcctcagcctctggagtagatgggattacaggtgcctgccaccatgtccgactaattttttttttttttttttttgagacagggagacagggtctggctctgtcgtccagactggagtgcagtgacatgatcatgtttcactgcagccctggcctcctgggctaaag[147 bp omitted]aaaccccatctctactaaaaacaaaacaaaaaaattagctgggcgtggtggcgggcgcctgtagtcccagctactcgggaggctgaggcaggagaatggcgtgaacccaggaggtggagcttgcagtgagccaagatcgcgccattgcactccagcctgggcgacagagcaagactccgtctcaaaaaaaaaaaaaaaaaaaaaagtacaccaccaagtccagctaatgttttcgtttttgtttttggtagagatgaggcctcactgtgttacccaggccagtctcaaactcctaaatttaagcaatcttcgagctttggcctcccaaagtgcagggattacaagcatgagccaccatccccaagctcttttctgaaatgtttattttagttttggttcagggggtacatgtacatatttgttagatgaatatattgcatcctggtgaggactgggcttctagtgtacccatcacccaaacagtcaacactggacccattaggtaattttttttttttttttttttgagacggaatcttgctctatcgcccaatctggaatgtagtggcccgatttcggctcaccagaacctctgcctcctgggttcaagcgattctccttcctcagcctcccgagtagctgggattacaggtgcccaccaccaagcctggctaatttttgtatttttagtagagacggggtttcgccatgttggccccgctggtctcgaactcctgacctcaggtgatccatccgcttcggcctcctgggattacaggcgtgagccaccgtgcctggccccattaggtaattgtccaatgctcatttccctcccaagctcccctctttcaaagcccctaatgtctattatttccatctttatgtccatgtgtaaccattgtttagttcccacttataggtgagaacatgtagtgtttggttttctgtttctgagttagttcacttaggataatggcctccagctccattcatgctgctgcaaaggacatgatttcattatttttagtggctgcatagcatttcatggtgtgtgtttgtgtgtgtatcacattttctttaattaattacttttttttttttttgagatggagtctcactctgtcacccgggctgcagtgtagtggcacaatctcagctcactgcaacctccacctcctgggttcaaatgactctcctgcctcagcctcccgagtagctgggattacaggcgcctgccaccacgcccagctaatttttgtatttttagtagagacagggt[137 bp omitted]ctctgtcacccaggctggagtgcagtggcatgatcatagctcactgcagcctccagcacctgggctcaaatgatcctcccaccctggccctggcctcccaaagtgctgggattacaagctggagccaccacatctgacctcacattttctttatccagtcaactgttgatgaacacataccttttctgatgatagcttcatccgaaggccagatcacatcataatcacagaataatgccaacagctgacagctcacctggagttacacatttcctcatccactttcagagaaggtttgtataccttaaccatcaaacaagagtcttgggtttcatcatgaaaggaccaacttacttcctatttctatccctgggccaatcactatgaccatgaacaccctaatcagcttatgtcagggtacttgttgggtccttaaactgtgtcagagaggaggcagtctattaagtggcttagatccactctcgcagctgagagtcaatgtcaccaaaaattctagggatgaggtaggaatagtttctcaaaagaaaaaagagtaaaagttgaatggattttggatacatctccaactaatgtcttctgtacaaattctttttttttttttgtcttaagatggagtctcattgtgtcaccaggctggagtgcaatggtgcaatcttggctcactgcaacctccgcctcccgggtccaagtgattctcctgcctcagcctcctgagtagctgggactacaggcgcccgccaccactcctggctaattttttgtatttttagtagagataggttt[132 bp omitted]tttttttttttttttttgagacggagtctcgctctgtcgcccaggcgggactgcggactgcagtggcgcaatctcggctcactgcaagctccgcttcccgggttcacgccattctcctgcctc[227 bp omitted]caggcctgtaatcccagcactttgggaggctgaggcaggtggatcacttgagtccaggagttcaagaccagcctgtgcaacatggcaaattccatctctacaaaaaaacaaaaacaaaaattaaccagacgtggtggcacatgcctgcagtcccagctactaggcaggccaaggtgggagaatcgcttgagcctgggaggtggaggttgcagtgagccacaatcatgccactccactgcactcccgtctgggctctgggtaacaggatgagaccctatctcaaaaaaaaaaaaaaaaaaaaaaaaaaaaagagagagcgaaagaaagaaaaagaaaggaaggaaggaaaaataaatgaactacactagagaactggattaggggccaggtgcggtggctcccacctgtcatcccagcactttgggaggccaaggtgggcagatcacctgaggtcaggagttcaagaccagcctggccaacatggtgaaaccccgtctctacaaaaatacaaaaattagctgggcgtggtggcgtgtgcctgtaatcccagctactcgggaggctaaagcaggataatcgcttgaacccgggaggcagaggttgcagtgagcaggaggtttcagtgagccgagattgtgccactgcactccagcctgggcgacagagtgagactgtctcaacaacaacaaaaacaagaactggattaggtttcttcaaatgcatgtaatagaaatctactctagctaacctaatccaacagaaatttttttggaaagagatacaggagctcactggacgcaagagaacactgacaacacaggatagctcaggaatcagctaactttggggaccttagtagcaggaacttccctacagcttttcctgaacactttgctgaaatgaatgaagaccagttctgcatcctcgtaccaccttattcaccacgtgaaatcctaggaggagtacacttgtccgtgattaggtcacacccctgggctaggctcaggtaataaggcaaccgtccaatgggttcaccttgcccgctgcctagacagagccgatttatcatgatgggggaattgcgatagagaaagaggaattcacacagagccgactgtgtgggaggccagagttttactgttactcaaatcagtctccctgagcattcagggattggaatttttaagaacaacttggtgggtgggggaaagccagtgagccgggagtgctgattgatcaggtcagagatgaaaatatgggaagctgaagctgtcctcttgtgctgagtcagttcctgggtgggggccacaagatcagatgagccagtttattgatctgggtggcgccagctgatccatcaagtgcagggtcggcaaaacgtctcaagcactgatcttacgggcagtccagggagggtcagaatcctgtagcctccagctgcatgactcctaaaccgtaatttctttctttttttttttttttttttttgagacagtcttgctcggtcggccaggctggagtgcagtggcgcggtctcggctcactgaaacctccgcctcccgggttcacgccattttcctgcctcagcctccggagcagctgggattacaggtgggagccaccacacccggctaatttttgtatctttagtggagatggggtttca[141 bp omitted]gtactacaaaggcagtctagttctcaggcaagaagtaggtttgttttgggaaagggctattaccgtctttgttttaaactataaactctaggccgggtgtgatggctcacgcctgtaactataaacaataaactaagttcctctcaaagttagttcagcctatgctcaggaaggaacaagcacagcttaaagcttagaagcaagatggagttgcttaggttagatctctttcactgtctcagtcataattttgcaaaggtggcttcaataacaggaagaatattagggaaggaacttatttatttatttattttattttgagacagggtctcaccctgtcacccaggccggagtgcagtgctgcaatcatggctttctgcagcctcgacctcccgggctcaaacagtcctcctacctcagccttttgagtggctgggaggtggagagaggaggactgcttgagcccagaagttcaagaccagcctgggtaacatagtgagaccctgtctctacaaaaaatttaaaacaatagctgggcatagtggcacatgcctgaggtcccagctactcaggagactgaggtgggaagatcgcttgagcctgggaggttgaggctgcagtgagccatgatggcaccactgtattccacctgggtgacaaagtgagaccctgtctcaaatcacaccaaaccaagcacacaaaaaaacacaaaaacctatctccgaagtggcaccacatccagatggttttttttttttttttttgagacggagtcttgctctgtcgcccaggctggagtgcagtggcacgatctcggctcactgcaagctctgcctcctgggttcatgccattctcctgcctcagcctcccaagtagctgggactacaggcgcccgccaccac[186 bp omitted]acagaaaatccctatctataactgttccagagaatatagttttccaatttattttacaaggctagcataaactctgatcataaaaccaaacaaacagaaaaacagacaaagatccccaaaagagatctataagccactcctattttctaacttagaggcaaaagtcctaaataaaatatgagcaggctggacgcagtggctcatgccggtaatcccagcactttgggaggtcgaagcaggctgatcacctgaggtcggaagatcaagaccagcctgatcaacatggagaaatccagtctccactaaaaatacaaaattagttgggcgtggtggtgtatgcctgtaatcccagctacttgggaggctgaggcaggagaatcacatgaacccaggaggcggaggtcgccatgagccgagatcactccattgaactccagcctgggcaacaagagcgaaaaaagagatcaagaccatcctggccaacatggtgaaatgccctctctactaaaaatacgaaaattagcccggcgtggtggtgtgcacctgtgatcccagctgctcgggaggctgaggcgggaggatcgcatgagcaggttgcagtgagcggagatggcgccgccgcgctccagcctgggtgagggtcaaaaagaaaaaaaaaaatcaacagcctctgggctcggggtccttattcaatttcatggcttctctccagacaaactcccacctcactttctatactacctcgtcttccccacattttccaatacctttgcagcgggcaaattatataaatggcaaatctatggattaactgcatctggcttaagtgtctatcccttgtccggtcaccagctggaagcagataggggcaggctcaggcggctgcatggagctcctactggggaacagtgcagggccacattctcatcacagaaggggcagtggaccaacaggcagggcatggtgtctgactttctgtaatagacatttaacctggtcttcggaagtcagaaaaggctttccagaggaaggaattctgagctggaacttgccaaataagtaaaagttaggcagaaggggataagggttgaagaaaaagttcaggcacaggagagaatgatcaagagtaagggcagagtgggaacagatggggctggacaggcaggcaaaggggagaccttgcaggaccctgcaggccatgttgggaactttagactttctcctgagatctatgaggagccattggtgaatttatttatttatttagagacagaatttcgctctttcgcccaggctggagtgagggggtgtgatctcagctcactgcaacctatgccccctggggctcaagctgttctcctgcctcagcctccctagtagctgggattacaggtgccggccaccacgtctggctaattttttgtatatttagtagagatgggttttcaccatgttggccaggctggtctcaaacccctgacctcaggtgatccacccgcctcggcctcccaaactgctaggattacaggtgtgagccactgtgcctggcccattggtggatttcaagcagtggaaggatatgagcaaatgtgcagttctgaaagaccactccagtggagaataaagagaagaaagggaattgggaagttgggagaccagcaaggaggctgttgcagggaagcagtagcgagaagatggtgccctgggcagggcatggtggctcacgcctgtactcctagcactttgggaggccgaggtgggaggatcgcttgagcccaggagtttgagaccagcctaggcaacaaacaaatgtttttctgtctctagaaaaaaatttttaaatcagccaggtgtggtggtgcatgcctgtagtcccaactccttgggaggctgaagcaggaggatcccttgggtccaggagtttgtccttgagtgaggcatgattgcgccactgcactccagcctgggagacagagcaaaggagaccagcctggacaacatggtaaaaccccgtctctactaaagatatgaaaaattagccgggcatgatggcgggtgcctgtaatcccagctactcaggaggctgaggcaggagaattgcttgaacccaggaggcagaggtggcagtgagccgagatggagccattgcactccagcctgggagacagggcaagactccatctcaaaaaaaaaaaaaaaaaaaaagaagaagaagaagaaaggaggaagaggaggaagaagaagaggaggaggaggatatgaacaagaaacaacaacaaccttggactaggaatgctggcaggatggtgtggatggagagtagatttgagagagacgggagataaaatcaccaggacttggtgatggggatgaaagacgggagacgttagagatgactattagggattttgtttgtgttgactgaatggttaggtaaatgagtggatgatggtgccactcaccaggctgagcaacacaggaggagaagccatttggagagagatggtgagttcagctttgaacatattgttttggtgtctgtgggacatccaagtagagatgtccagaaggcagctggacatatgtgcttgtgtctcaggagaagggtctggactagagacatagatttgagagtcattaggttgtaggtggtggttgaaggcaagggaatggatgaggataatctcaggtggttgcatagcgtaagaaaagaagagaatgccgggcgcggtggctcatgcctctaatcccagcacttcgggaagccaatgtgggtggatcacttgagatgaggagttcgagaccaggctgaccaacatggtgaaaccccgtctctactaaaaatataaaaattagctgggaatgaagacagcctaagcacaaactctgggggcagtttaattgttcaagaaggggaatctatgaaggagactgagaaggcccaaccaaacaggtaagaagaaaaccaagaaaattacagggtcatgtgtcacagaggccaaaaggagaatcccaaggggcgagtggccatgggtatgcaggctgccgaaataaagtaagatcacagtggagaagtttcccatggatgtagaggagggagagcattaaagaccttggtaagaaccgagtcaatggagtagcaggggaaagaaatcagcatagactggggtgagaaggcagagagaaaggtgggagagaattaaaagtaggcaactctcagaatgcagctgtgaagaggaagagaagcgggcatctggagaggtttttttgtttttaagatggagttttgctcttgtcacccaggctggagtacaatggcacgatctcggctcaccgcaacctctttccacctcccggtttcaagcgattctcctgcctcagcctcccgagtagctgggattacaggcatgcgccaccacgcctggctaatgtatttttagtagagacagggtttccccgtgttggtcaggctggtctcgaactcctgacttcaggtgatccgcccgcctcagcctcccaaagttctgggattacaggcatgagccacgcgcccggccctggagaggtttttaaaagatggcagaaggctgtttggaggagtccacccccatctcccctgtgtaaaaggaaagcggaagagagaaccacaaagagggcctgggggaaagccgtggagtgaggcgataagggcttgtgtccaggggattcccggtcactggaatccctatcaggcctgcatttcctcctcacccccatccccttccttgccactggcttagtcctccatggggctagaagagagaaggacggagtcgagtggcaccctagaagacgctctgtgccttcggaggtctttctgcctgcctgtaagccggggttggtgctggggcaggagaggggtctgagggaggggaaagagccaaggacctggagctagtagttttaagttctgcaggcaagggtgggagatgggagtagggaggacaggaggtgtggatgctgtttctggaagcgaagctgcagggggaagggggctggggcctggggggatgcttccaggggatgcagggggatccactcaaggctcccttgcccacaggtcctcatgcctctcctcctcttgctgctcctgctgccaagccccttacacccccaccccatctgtgaggtctccaaagtggccagccacctagaagtgaactgtgacaagaggaatctgacagcgctgcctccagacctgccgaaagacacaaccatcctccacctgagtgagaacctcctgtacaccttctccctggcaaccctgatgccttacactcgcctcactcagctgaacctagataggtgcgagctcaccaagctccaggtcgatgggacgctgccagtgctggggaccctggatctatcccacaatcagctgcaaagcctgcccttgctagggcagacactgcctgctctcaccgtcctggacgtctccttcaaccggctgacctcgctgcctcttggtgccctgcgtggtcttggcgaactccaagagctctacctgaaaggcaatgagctgaagaccctgcccccagggctcctgacgcccacacccaagctggagaagctcagtctggctaacaacaacttgactgagctccccgctgggctcctgaatgggctggagaatctcgacacccttctcctccaagagaactcgctgtatacaataccaaagggcttttttgggtcccacctcctgccttttgcttttctccacgggaacccctggttatgcaactgtgagatcctctattttcgtcgctggctgcaggacaatgctgaaaatgtctacgtatggaagcaaggtgtggacgtcaaggccatgacctctaacgtggccagtgtgcagtgtgacaattcagacaagtttcccgtctacaaatacccaggaaaggggtgccccacccttggtgatgaaggtgacacagacctatatgattactacccagaagaggacactgagggcgataaggtgcgtgccacaaggactgtggtcaagttccccaccaaagcccatacaaccccctggggtctattctactcatggtccactgcttctctagacagccaaatgccctcctccttgcatccaacacaagaatccactaaggagcagaccacattcccacctagatggaccccaaatttcacacttcacatggaatccatcacattctccaaaactccaaaatccactactgaaccaaccccaagcccgaccacctcagagcccgtcccggagcccgccccaaacatgaccaccctggagcccactccaagcccgaccaccccagagcccacctcagagcccgcccccagcccgaccaccccggagcccacctcagagcccgcccccagcccgaccaccccagagcccacctcagagcccgcccccagcccgaccaccccggagcccaccccaatcccgaccatcgccacaagcccgaccatcctggtgtctgccacaagcctgatcactccaaaaagcacatttttaactaccacaaaacccgtatcactcttagaatccaccaaaaaaaccatccctgaacttgatcagccaccaaagctccgtggggtgctccaagggcatttggagagctccagaaatgacccttttctccaccccgacttttgctgcctcctccccctgggcttctatgtcttgggtctcttctggctgctctttgcctctgtggtcctcatcctgctgctgagctgggttgggcatgtgaaaccacaggccctggactctggccaaggtgctgctctgaccacagccacacaaaccacacacctggagctgcagaggggacggcaagtgacagtgccccgggcctggctgctcttccttcgaggttcgcttcccactttccgctccagcctcttcctgtgggtacggcctaatggccgtgtggggcctctagtggcaggaaggaggccctcagctctgagtcagggtcgtggtcaggacctgctgagcacagtgagcattaggtactctggccacagcctctgagggtgggaggtttggggaccttgagagaagagcctgtgggctctcctattggaatctagttgggggttggaggggtaaggaacacagggtgatagggaggggtcttagttcctttttctgtatcagaagccctgtcttcacaacacaggcacacaatttcagtcccagccaaagcagaaggggtaatgacatggacttggcggggggacaagacaaagctcccgatgctgcatggggcgctgccagatctcacggtgaaccattttggcagaatacagcatggttcccacatgcatctatgcacagaagaaaatctggaaagtgatttatcaggatgtgagcactcgttgtgtctggatgttacaaatatgggtggttttattttctttttccctgtttagcattttctagttttccactattattgtatattatctgtat[132 bp omitted]tctactaaaaatacaaaaattagccaggcgtggtggtgcacacctataaccccagctactcgggagggtggggcaggagaatcgcttgaacctgggaggcggaagttgccgtgagccaagatcgtaccactgaactccagcctgggtaacagagtgagactccgtctaaaaaaaaaaaaaaaaaaaaaaaacttctggccgggtgcaggggctcatgcctgtaattccagcactctggaaggctgaggcgggtgggttgcttgaacccaggagtttggcccaggcttggcaacatggcaaaacccgacctctacaaaaaatacaaaacattagccaggtgtggtggcatgcacctgtggtcccaggtacctgggtggctgaggagggaggatcacctgagcctgggagatggaggctgcagtgagccctgaaggtgccactgtactccagcctgggtgacagagtgagagcctgtctcaaaacaacttggcttcttttggtgaagagtggctggggcacctgtcatgagaattcacaaggctccaaatgccctaccctggtcacaactacttatccaatagacctccagttacagcctacacttcccctgcctggggtgcctcctctcctccagggctggccacccaccaggccaccccaggcatcagatccagctcaaaaattgccttcctggagtttaatgacaactgctgggacctacctggcagcagcctgcagtactaggggcaaaggtgggtgcctgctttgcacctgcagcctcagaagtgcagctctcctcactgcccaggtcagcaggacagcaaggggtggaccctgcagcatgcaccatcttggtgtgactgaatagtcttgggtttcctgctctcaggctgggacacaggcaaatggaaccccatttcttttctcataaatcctgccattctctaaacacactggtgtggcttcctctcctgccttgtctccagcccaatccaaggcttggggcccagagaatgggactatggagacccccatccccctccagatggtcctgaagatctcccaaacctgaaagtctgaccgaatctctccccaggtggaggaccaactcctgagcttggcagtcagggagtgccaagcactgaccccatctgacagtccagcttcatctcaagggagatacctcacagtctgtgctccaactatcacaagcctatagatcacctgctccccaacagtgttttactctaagcctttgccctcagtccagccaggtgtgctatccttgccccatccccagccagtctaaccactcagtctgcaagtcactactcccaggcgaggccaggtgctccaagttaccctgcaacactattgctacactcagtttcccaactgctcctgtataatcttgtcttctggaccaggaactccttaaggacaaggtctaggcttcaggcatctcacaatagccaccaaggcgcaggacagtgtacacagaggcagcagcaggggcgccaggatgctgagctccacctcttctgctgatgaggctctgccaaagggacagctcccacctgctgcctgcctgtcccctagcctggcaagcactcctcagtttgaccttcccaaactctcttgtgccccaagaggttttaaggctccttgaaggctggcctgggaaccacacatcttctaaagaaatggacaaggttctcactctccccagccaaggacccagatcaggtctctggccagcattcccctttcctcaagcttccagtgcccacccacttaagccctggccttccacctgcactgcctccagcccacagtggtctgacttcctctctaagtctctttatttcctccctctttaggctgcagaagcagtcatcagaccgaggggcttttcctggggattatgtgagatgatctgggcatcggtggcattcttgggcgagtggctggaggaaacacaccgggcctgggatttgagtttttctggccctgtcagctgctgtggcatgacagatttatacagcatttgcaaaaaaccagcggctgctttttctttaacaatttttcttaaaaactccagttcctattctccagcttctttgtccagtctcctcccctctcctagccaccccccagactctccagatttggggctggtgtcatcaatccaatttattaagtcctcaatgagggggaggaagggccacatctccctctgcaggccctttgaccatcttgatggcttctgctcctccctgtcccctcagctctgccttggtttccccactgacaaaggggatcttctgctgtcctgtgtgccctgaaactaaaacccagggggaggccagaaatcctcagaagttttccagctccctgcaagaatagccaaggacagagaaatcacaggatcaggacgagcagggcaagctggagcagggggtagaacagaccaagtcctttaccgcagaggaagaaaccacactgtggaagggaaataaatagaggggtccagggcagcagagcccaggcccccagggcgcagtggctataggcgcagcaggcgagtgggagcccccggccgcttcagccactgaggaagagacgcttgtaggccttgttcatctgctccaagaagatgaaggtgaggacggtgtgggggcccaggcgggcatagtacggcgtgaagcccttccacaggctgaagaagccctcgtagcggacaactttgaacagcacgtcctagacacagacaggcagggcgctggggctaggactctaggtccccatccccctcacccagctgccttcacacctttcccaggggatccgacaccccctcccaggcccccagaatggcttcctcaccagcccgttcttgtattccggcttcccatcaatcatccgcatgttctggattctgcaggagaggacgcaggggcatgagagaccgaaagggcaccctcccacccacctccaggcccaggctgcacactcaccgggtcttggcaatgtccacaggcatggaggcagcagtggtgacaagaccgctgatcatgctggcacagaagtggcacaagatgttgtcagagaagtagcctgggggaggtgaggcgggggtggcagtcagctcagaggtggctcaggccaggctgggaactaagggcccagctctggatctcacctgagtccagtaagaactgcttggattgggagtaggaggcgagctgggcagcattgacgacgacggcccgagccatggtagggatgcagccctggagggaggggagcggggaagagtcagaaacccctaaaaccagacctcacagcccccaagtctccagcccctccactcacccgccacagtgtgaggacaccctcttcccgggtgattcgaatcagggcgttaaacacatttttgtagccacggcgctggtcagctggaagcctggtgggaaggcagaaagaggtcaagatcaggattgcccacaggtgcaaagaaaggaaggccagaacaggtaaacactctgctccagatccgggataaaaaactggtcctttcattctagattcgagggaatggggctggggttaggttcagacttggaactcaccggccatcggcagtcatgcggataagagccacttcggctggtgttcccacaaaggcaccagtggcacctgcggtcatgccaatcacagccttcagcagaaagccagggggagtaccatcagccccagtcaggcgctcaaacagcacggtatagatgccaaggcgggtagtggtgtaggtggcctgacgcagcaggccagccgacagcctgaggagcagaggggtcagcatatcaggccaaggtctagagctgccaacccacagtctaccctccatcctgaggccccaatacccagtgtaaatgcccctcaggccttctgccttcaggatactggtgagggcatggaagctggttttgtactctcgagtcttggccccttccccgctcaactgcatccggttcttcaccaggtccaggggctggacaaaaactgtagctcccatcctgggggaagacagaggtggagtgaagggccaggcattccagatctaccagtgcccactggagcctggcagcaagaggttacaaaggtcagggcctgccatgcgattcaagaatcaggatgctggtgagcatgtgtataagagtctatatgtacaccaagtgcaacgggtctgaaaagtctagttgtccagtaggggccatgcaatgaaagtgctccaagcagcttcatgacagtcaagcagtgacctggggctgcacgcagtccgacacagggaggggaggaaggggcatccaagatttaggactccaggtagtcctgcaggagccatttaatggcctggaaccccctgccgcccggccgagcttagcaatgcgctgggaaactcagctggcccggcgggggttgtgcaacgaccctgcatgcagtccataagggtcctgcaatggggccctagcagcccatcggggaactcgcaatacgctggagatcgcgctgaccccgtgccggcacagttcactgcaacagacccagagatgaaccgggcccggttccttttgcccttcccttcctcctcttttcccatccctggggcctgagcttacccggccaggcccccaaacaggaacttgacggacttaggggaggtacggggcttcccgtctatcccgccggccccggcactcgccgtcgccgccatcgccactcaatggccctcggctccgggtcccgtgcgcgcgcggccccgctcgcgcccaaggtgacaccgcgcgcgcaacagagcgagggcgcgcgcacgcccctccagctctcaggtccgacacccgctggaagccggcgcgggcgcaggcgcgcagcgcaaaggcggccgggagtaaggcggagctgaaggaggagcttgatggaagcgtgcgagaaggggcgtaactgatttggaaaccagaggaaaggcgctgttttcaccgaattagaatcgcgggaaaatagagaagagtttgtttgaaggtctcgcgagatcgagtgagtacggctcgccaagttggagcgctctcgcgatagacacagcaactattcagctgcgaggggacgggagaggtggtgagcactctcgcgagatttgaaggagcggcggaggccagagggaggagaggtttgtaaactaggaggctccgggtttccgggcacttttattaggtcgtcttctgggccaccagtgccccttccatctccacaggcagtccctccatcgctaacctttttttaaccggccttttaggaccggaagtccttcatctcaagcatccaatgctgaaagcggcctgattttctctaccggaagcccttttccagaggctgggaacacggcccacctagcaggaagtcccacctccttgagctccgccacccttcccgaagtttttctgtcacctgtgttaggctccgtcccctttccgcgttttatccccgtaccagaaaaggatacatttagtgcctcccacccagctccactaaacgggttggatatctcattctttgagttggtgttccttccccggcgcccccatgtagctgggaagtgggacctgggggtggttggacccctgggatcctaaaggaggggcagggagggcgcagaactccgcttctgctccttgctaccaggacgcgcggcctcctcagcctctttcctcccgctgccatgcaccctgcagccttcccgcttcctgtggttgtggccgctgtgctgtggggagcggccccgacccgggggctcattcgagcggtgagtctgagggacggatggggaaagggcgctgaaaggaagggttgcaggctgaaggggaacatcgccttttttgtccgcagacctcggaccacaatgccagcatggactttgcagaccttccagctctgtttggggctaccttgagccaggagggcctccaggtgattttctttcttttcttttcctccttccctcccttccttccttttctgtcttttttctttttttagtatttcgcaagatcctccatcctaggctggggttggggaggtttgtcctgggtgaaactggaggtaggaaaatgaagttaggaactgagcacgtctagtgtagaacccagaatctagagggagaagacagagtgtccacccctggaactccgaggttatcagggagactgaaagtggacgaagacagaaggcaggatcaacggtccttatcaggaaggtctcaggtgctagttattgcttatatgactttgggcaagttaatctctctgagccttagtttgttttactgtaaaatgggatattagaagttttcctagggttattgtgaagatcaaagtagatacgcaattttggtagtatttcatcccaaagactgccacatagcaagaactcagttgggccttagtagcagtcgagttgtttgtgagatgggtaattagaaaattgaagaggccgggcgcggtggctcacatctgtaatcccagttcaagaccagcctggccaacatggagaaaccctatctctactaaaatggcaaaaattagctgggcgtgatggtgcacgcatgtagtcccaactacttgggaggctgaggcaggagaatcacttgaaaccggaaggtggaggttgcagtgagccgagatcgcgccactgcactccagcctgggtgacaaaacgagactccatctcaaaaaaaagaaaaacaaaaagaaaactgaagggaggggagtgtgtctgtatgagtatgtgctggagaggggactgtgaaacagaacttgagagaaagtgacatgggtggtttgagaattgaattacaattggaatattagaaggcaaaaataattgcattagcttgcagtatagggtacagattagcccatctgggacagcgagagggatgatgggagagtttggtgaagggatgttttatgtcattgccttttcaagaggctaagagaaggttgtgatggtgggatgctcactcagaccccaggaaggaggaggaagtgaggatagaggatgtgcagcatgtgggctggtgtgtttggtggcccctgtagagagcagaatctagaaaggagaaatctcactgttgtttgcttccatccttcaggggttccttgtggaggctcacccagacaatgcctgcagccccattgccccaccacccccagccccggtcaatgggtcagtctttattgcgctgcttcgaagattcgactgcaactttgacctcaaggttgctgaatgaggaaggggagctgggcagctgagggtaaaaaaaaggcaccaggaatgaagacaggtaaggcccatgatggctccttgtcctctgccttgtctccctaggtcctaaatgcccagaaggctggatatggtgccgctgtagtacacaatgtgaattccaatgaacttctgaacatggtgtggaatagtggtaaggctgggggaatctatacagctgggctttcagtaggacccagagatggtgggaaggctgaaggcctcaggaaaagaagccaatcctttaggtggggtggggccaaagtgcaagatgccagggttcccagaggatttgagtagaaggttgtgagtccccagagtaacaccttgatccctgcagaggaaatccagcagcagatctggatcccgtctgtatttattggggagagaagctccgagtacctgcgtgccctctttgtctacgagaaggggtaggacatgtgcctccttcccattcttccttcagcaagcagttccatgccaacctggagcccaggcctcctcattacccgaaccattcagcctcctgtccttccttccctgcctctttgactttcttcccattcctgtccccacctatgggctttgtccagagccagttactttgtccctctttttttctccctttgcctttctcgccctgctgagactggtcatccttttcccagggctcgggtgcttctggttccagacaataccttccccttgggctattacctcatccctttcacagggattgtgggactgctggttttggccatgggagcagtaatggtgagtagctgagggaacatgatgggaagcactgaggcctgtgaggccagactggatctggagttgggagatgggagtggcttgtcctagattgtctagttttgttcctaagccttgtccatccacccccgcttcccccagatagctcgttgtatccagcaccggaaacggctccagcggaatcgacttaccaaagagcaactgaaacagattcctacacatgactatcagaagggtgagggggttaggggagaagagggcttttcccacagtttacctggttctgaaggactttgagcccagaagatagggtatacaaagatggcagtggccgggcacagtggctcacgtaatcccaagtgcctctaatcccagtactttgggaggccaaggtgggcaggtcacttgagcccaggagtttgagaccagcctgggtgacatgataaaacagaaaagtcccagcactttaggaggctgaggcaagtggatcccttgaccccgggagttcaggccagcctgggcaatgtggtgagaccccatctctataaaaaaataaaattagctgggcatggtggtgtgcacttgtagtcccagctaattgggagactgagacaggagaatcacttgaaccaggaaggcggaggttgtcgggggctgagattgcaccactgtgctccagcctgggcgacagagggagtccctttctcaaaaaaataataataaaaataaagatggcagtaggaaggtttcagcttgagatgctgtcttttcttctgtttttatgcataaatacaacgaagacgggagaggagatggaaagcaaagatgattaagtgaaataattgtgggaaacaatagagggatagactttgcttataggggatgtggacagagcagaaaaatgggaggaatggggaggattcagttagagaaggaagaaaccggtaccaaggggctggggctttaggccctggggcctccagtgcccgtataaggctgtggcagaagccctgcccatttccgttccttccactccctatctccaccctcacacctccccaaaaacccacttcccttcttacctctgcttctctttgcttgtcccttctagccctaaattcttccatgttctgccctgaccttatcctgcctacctgtcttatctcttccactggctttgtaggtgaggggaaatttttgcaaggctttaaaagccttagccctgggtcattgtggctcagtgaaggactagattattttctttctgtcccaggagaccagtatgatgtctgtgccatttgcctggatgaatatgaggatggggacaagctgcgggtactcccctgtgctcatggtgaggccctcactgcctgcccatgcccctctgccaccagcagccaccaggtgcttcaccttgttcctctctgcagcctaccacagccgctgcgtggacccctggctcactcagacccggaagacctgccccatttgcaagcagcctgttcatcggggtcctggggacgaagaccaagaggaagaaactcaagggcaagaggagggtgatgaaggggagccaagggaccaccctgcctcagaaaggaccccacttttgggttctagccccactcttcccacctcctttggttccttagccccagctccccttgtttttcctgggccttcaacagatcccccactgtcccctccctcttcccctgttatcctggtctaataaccccccacacatacacctctggtgacctatttgcacagaccgtcgtcttccctccagtcttctgagggataggggacattccatcccaagcttctcccttacccacacctatccttttgaggggctttggggtggagctggggcaagcagagggactgggtcttcacttcttgggctaataaaattgtttctttgtggactaaggaagggtaagatcattctcacacaggtgaacttaaccctttggtggaatcacccctttagccataaggagcaagggaatgctgagagacactaacctatagtcatggggacagccccagccggcatttgctatgactcagaagggggagccccacccacaaggatgactcaactagccctgccttgcctgcaggcctgcacccattctctggtccagatggctctattccatcatccaccaatttgaccagcacactgaggacttaggcctggaaatgccactgtggaggggcagggccacctggccagaagctcaaattcctgcaccttgtagtacctcaacctccctgctcccaagccacgataaaggaggcaagtcacagtgcctatcccccattctgacacccaagctcaaatcacacagcaccttgttagtagaatcttttttattcagaaaaaaaaaaccccaaaaaacaaaagttttccaaccacacacgggagggatatgggtagggggaggtgtctgtccatccagccctggcccccagcccatgtggttttggcagcaataaggggtatggggtaatggcccaaaaaataaaatggtttgtgtgtgtatggggaggaaaggggtgcaaagctgtggggagcggtgaaggggaagggacagacgaggtcagtactgggaacgccgaaggtgggaggccatttcataacatttcttgttgatcaaaccaccgtggacaccttctttgcccatcagcaggactagcgctggaggaggaggaaagagaaaggaggctaggatccaggtgtcacaattccaccccctgccagctgttcagcagctgtccagccctgggggctgtaacccaacctcatctctcccaacccgcccccccaccacacacaggcaggctgtcagtcaccctgaaacaataaggcttttcaaaagaggaaaatcaagcttaaacgctggagaggaacagactaaaaacttaggggtcaaaggctcatagactgttgattcatgtgttcaggctagaaagggctgtggatgtgcatgccacctccaggttctaacaaaagaactcaaacgatgaactcgatgattcaagaccccaacaatctacctatactcctagaaaacagtttctaatccgagctcaaggcagtaagtaatttaagaggtaatgcagttcagcaacttcgaattacaagatgaggaactgagacagaatggagggactatcccgtgttccagcatccagcagacaaggaacacaatactggtctgactcccttcatgttggggaatcacacaaaaaagcaccctcaagattaccagaaggcggtacattagagatcttggagctaaaggaagggtaagactcaggaactcactcttgtcagtcttggtgacagtgacattgaaggtgggggccccaccggtgctcttggtacgaagatccatgctaaattccccatcctgcagcagtgagtcccggatcaccgaacatttctggcccccaagtgtcagcccattcacgtaaaaacttgaccggtctttgccaaccaggacacccacctcagctggctggaagaggaaccaagcgcccatcaagttagtcagtgcaccaagattcccaccgtgttctccaaagacccacctgtcttccacttctgagaaccaccccgccgtgggggctaagtataaattatatactcagtacacatcaatgaactgtgagaaactctgaggactgtgggacgttagtgcagaaaaagatcatgattctgaaacttagaatatggaaccagggaggaagggatgacatactcctctagagatttagatgtcagtgttaatggggaaagtaaacccaggaaataaagggagtcagtgaggtaagtgaggagcctttggatgctcagaactctccttcaggaaaagcagaagcggagaggggaagggaggggggcgggcgaggcaagagaagcaactttgcccttatttggtcaaaggttctgcaggagctgttagggcccggacgcctgggtctccaagtaacctagagtttagctccaggtatctctgctctgagatgaggaagcagacccctgggggctttccgggaaagttggaaaacttttgaaggtggacaggggccagacccggcaggccagctctcgggtctaggtaccccgggaacctttcccccctccccctttcaccccaagcccccacatccggtcccctcccgcccggaaacccccttccccccccttttgaacttccgctccccctccccacttccgggcagtgtggacagggagatggtggtgggagcagcggtagtaaaccaatatactttcgcttatgctgtctcagaacttctcacaaagttcccctgctccaggccccgccggatggcgggaagggagggcgaggggacttccgggattggcctcgcaggaatgttgaatccaacgtgctgagctgggggggcgtgtggtggcctcgccctctctaacggagttaggaggggccagaagcccacagagggtgggcaagggaccaagaccacgcgcctggggctcccttccgcaccaggagaaacaatggtagagggacgcgggctggcagccggacggggagctgggggtccaaggatccccgggtcccctctcaatcccaatccccagtaaaaactgaggcgcgtccccgccccgccctgggagaggcggaagtgggccgccgcaccgggcgccgcgcccctccccgccctgtgccccggatgtaacgccccgtcgcggaaagcggggtagcgggcgggatgggcgccgccgcctggggcataggacctacgggcaactgagggacccactcacgtgcagccgccattcgcgccgcttccagggcaagcacccagtcagggcctctcgctgcgcgccctagaccgcgcccgcccccacccaagtccctccctcagggtccaaaccggagcagtgccccggaccgcgcaggcctcgcagtaccgtgatgttgacgaacgttttcccggggacggcggcccagacggagggcgagtccttgtagcccacgatggccgcgtcctgacaggtcccgtccgccatgaggttgtcgatgtaggcgttccacccggccatggcgctgctactggggctgctctcggcgctgctgctggggccgcggactgggctcgagctgcctcggctggcgggcggggggaggcggagagctcggggcacgcgctgccgtccggaccgcggctccgctcgctgtgcagcagccctcgcaccgccacttcctgctcctccccccccccgccccgctagatttttatttgcaaaggacggtaggggcggggcctactccccattccctccctcccccactcgccagcccagacaccgaactttgcaaatgcaattttaaaaatccctccccctattgcaaaatttgcagagttcgatggaaagcaatgcagaaggatggggggtggcgggagagaggtgaagggtagggtttgctccaatttgcactgaatataaaccagactttggtatcggggcagggagtgagccagaagaaggaaggaaggagaaagcaggaggaattagcaagctgcaaatttagcaaattaaggagagttcggggagcccagggttaaacgggatgactcctccttcccccacctccgccgaagggaaggaccggcgggcggcggcgcgtgtgcccgcgcctgcgcctgcgccggggccgggagtgcatggggcggtcggggccggagccggctgcacgggagcgcgcccggcccgacccgtgtggaccctgcgggaaaggaaggcgggctggggacgtgtctcccgcctggcggaaggggcgggggcgaagccgtgcgcgctgccgcctcaccacccttgattttacttattcaagtaataagaaagcaaagaagagtttggccaaatcctctagtcgctctcatagctgaaggcacccaccggggccacttctgtccccagcgtcttctcgggtcgtgcaggttgggttcaccagggcccattctcagtctagaggattgtcccttctctggatcggctctagcccagggcctcaccccacatcccagccccgcccgccccaggcaggcaatgtctggatcaccggccgtgccccttggcctgtgtctgcagaggtcacagagcgcggacacccgcggggcttaacaggcggggctatttttcgaggcggaagaatactcaagttgcaagagtggcaactttttcaagaaggggaaagtcccacttcgggccctttgggtttcttcgcagtcagatgtgcgctcacagccacctggggagggcgggacgggcgggacggccgtgcggcggccgcggtgaaaccgcctcctccgacccgccgccgagggctgggcggcttccggagcctgggctaggggcaaggggtcaccgagcgcggcccgggcggaaagggggttggttttctctctcctcccgagcgcggcgcgcatccctggcgtccacgccgaatcccacagtccccgacgcccctcgagtccgtgttcctcgacagccgcgcggctgagtcactggcgggctcgggcggggccgcacccgggcacgtggcggcgctccccgcccgccatctcctgacccctggcccaccgcacccctaccccagggtggaaaaatcccgggaggagcggcctgagatgagggggcggggcgagaggggagactggacgggtggcggggcaggtggcctggggtgggggctgggaggccgcgcgggccggcggggcggggagcaggggtggggagagggcggcgggggtgagtcaccgggcgcgcgctgccccggcgccgacgggaagggcctccgagtcgggccgaggcgccgtgtgtcccccgccggtcggctggtatggctgcagaggagctcggggcagaccccgcactggccccagagccggcaaagtggagatctctaccgagggcagagacctacctccccgcagtgctacaagtggggcgccggaagagccccaggcgtgcagaagctcacaaaaggccacccgtcctcggtccattcatttttgttcactgttgattcagccccattcattgatgggctggggccgtgcgctgagcgcccacagtcgatggggaaaggggctctgaccgacagtccccacgccgggcgacaagtgctgtcccagcgttatcagtcgggcgccttgccagccgaaagggcctgtctaaattcgtttcctgtcccctaactcatcccggcgctggctggcctggagagggtaggatggggcggcgccgagaatggccgttatgaggaccctaagaggtgagaccctctcgccttctggggtggggggtcccgtcctttcccccactgaggacagaggcccgcccagcgatctgagcatgtgtggacgtcaatcttgcagcccctcttccaggccccctccccagccttgcagggctcaggttacccctggcctttcctaaaggtcactcattcctcttgacgtttgcaaaaggggaatgtaatcctggggtggggggagacccctcatctgtagcccctcccttgctcctcccaaagggtggaattagaacagggactgttattgggagacagaaagtgggggatagtagttgacctttggtaagggggcaggtgcccagggccagaggcttctgcttcaggctgtagtgggcacttggctgccagcccagtgtgaaggggggaggatggagagaaagagaggcggggctggctggggaccgagtggctcagggataaatgcgcagcctgagagggggtgagctgacactgtcccagctgccacctagactcggagctccatccaaacctccagcgaagacatcccaggtcgggtgaatcttccagccctgggggtggaggtagtaaagggtgagcatggtattggcttggaggaagtgggggacatttctgctttttttcctcctgggactggagatgcttgaaaaagctgggggaaggggcggctggagcaagcagatgggacaaactctgggaacaccgaaggatctagggaaaggaggctgtgaggagggcagcagggatggatagaaaagggcagctagagctggaacctgatagggaattgggggcccaaggagatttcggagcaggaaaatgagaaccagaaaggatttgaaggccaccagccatggagaacagactgcttgaccagaggggtggaaggagaaggcctaagtggaggcttgggggaggtgggggcttggtgagcggtggcatcccaggagctatagataagaggcccctggattcttaggatgggagggtggaataagagctgttctgagtgggggagggggctgcgcctgcctctttggtctgtgacctttttgtagggtatttttagctccagcacctgccttcttggagtggggaagaatcttaaagggcaagggatttctggttccttaagagatcaactgtctacactcactcacacctcctgtcctgcagccatggccatgcagaaaatctttgcccgggaaatcttggactccaggggcaaccccacggtggaggtggacctgcacacggccaagggtaacacaaggcccattggataggctcgcctccgaagaccccaaccctttggcctttgccccccagttctgtgccatatcctctcctttctctcgggttccctttcccagacttcttcccaagcccccttcttccaacgtggaaccagagctggaagctaggagaagcaggagtctctctctgcactgcctcctgtccctgagctcagagaggacacctcagccctttgagaggtagagagactccctgtgaggtccttttttttgttttgttttgttttgagatggagtctcgctctgtggcccgggctggagtgcagtggtgcaatctcagctcactgcaacctctgcctcccgggtttaagtgattcttgtgcctcagcctcccaagtagctgggattacaggcctgt[136 bp omitted]gcctcccgagtagctgggactacagctaattttttgtatttttagtagagatggggtttcacg[140 bp omitted]ttagccaggctggtcttgaactcctgatctcaagtgatccacctgcctaggcctctcaaagtgctgggattacaggcatgggccaccgcgcccagccatccctgtgatcttccaattcctcctgtcccaggccgattccgagcagctgtgcccagtggggcttccacgggtatctatgaggctctggaactaagagacggagacaaaggccgctacctggggaaaggtgaggagacaccagcgcagaaggagcctgtgtgggcggctttaggacatgggtgcacaatgggtagaggactggaacccccaaggctcttgaggagctggggtccacagaaaggggcccagttgattgagctccaaaactcatcctctggcctgtctaggagtcctgaaggctgtggagaacatcaacaatactctgggccctgctctgctgcaaaaggcaagtggggaagcccgctcgctgcagcctcctccccatgcccctgctccctcagcccagacaggcctctcccgaaacattttcccttatccttcccctgcatgtgccctgacttctgagaaatctgacctctgctctcccttctcaaactcacccttccagaaactaagcgttgtggatcaagaaaaagttgacaaatttatgattgagctagatgggaccgagaataagtgtgagtgaagggctagcggtggggaagggatgaggtgtgggagagatggcgagaggccatggggtgaggcctgatgggttatttctgggtcccccattttgggtcacaccgcagctggatggatttgtgttcattccacaggcatttcctatgcctgccttctgccaggcctgggccgggctgtggacacagacatgcagctgacacattcccccggggtgggggttcccagggctactcaggctgttggggagagatctgttaaccaattcttcatgctcagtggtttggagctctggcgtcttcctggagtagccaccccaaaccctgcagaagctctcatcctttcttcccgcttgcctccttccagccaagtttggggccaatgccatcctgggcgtgtccttggccgtgtgtaaggcgggagcagctgagaagggggtccccctgtaccgccacatcgcagatctcgctgggaaccctgacctcatactcccagtgccagtgagtgcagctacccgcccttcccagatctcgcctggacagagccaaccccgcccagccagggttggcccccctggaaaatccacctttcagaccagctcctaagaagcagtttcctgaaattgaatctctcctgctgtggtcccacccctccctctcttccacaatccaaaccttccctgaaggctctatgtgcttccttccctgccatataacccagttccttcccattccaatcctaggctcgataactccagcctcgttccaaccccacaccctacacccaaatcatattgagagtttctttgaggcaaagatcttggcatttctttgtatcttcttgagtccttcttaaaccagtgccttcttgatgaatggaaactctttgaatttaatctcaataataatgttaccatttcttgttacttactaggaggattgcataagagcatggtctctagagatagattgctgggtttgaatcctggctctgcctgttattagttgtatgattttaggcaagttctttaactgctctgtctcagtttccccatctgtaaaatggggggtaataacgataccaatgaatagaggtgttttgagaatgaaatgggctaatacatgtaaagtacttagtgcgtggcatgtagtaagtgctatataaaagtgttagctattatatactaggcacatgctaagaactttacattcaatttctctaattttcagcaaaagatcctacagggaagtaggtgctatccccattttacagaaatgaggaaagagaggctgggcacagtggctcacgcctgtaatcccagcacttcgggaggc[134 bp omitted]aaggcaggagaatcacttgaacccgggaggcggaggttgcgccattgcactccagcctggtgacaaagtgagactccgtctcaaaaaaaaaaaaaaaaaaagaaagaaatgaggaaagaggctcttgagcaaaactactcatcctagaccactgagctagtaagtagggaagccaggtttccaccccaacaccccccgcccctgtcccttcttgagctctcatgccccggcccaggtccagacaccctctccccatctcaggccttcaatgtgatcaacgggggctcccatgctggaaacaagctggccatgcaggagttcatgattctgcctgtgggagccagctccttcaaggaagccatgcgcattggcgccgaggtctaccaccacctcaagggggtcatcaaggccaagtatgggaaggatgccaccaatgtgggtgatgaaggtggcttcgcacccaacatcctggagaacaatgagggtcagtgctgagcaccctggggggcagaccccctggatctccacatgggcaggggaggctgcagacaaggggcactggagtctcaggtcctttcttggtcctcccccagccctggagctgctgaagacggccatccaggcggctggttacccagacaaggtggtgatcggcatggatgtggcagcatctgagttctatcgcaatgggaagtacgatcttgacttcaagtcgcctgatgatcccgcacggcacatcactggggagaagctcggagagctgtataagagctttatcaagaactatcctggtgaggcgttcgggtgtcccagtgttcctgcccgaatcccgtgcagctgcctaatatactgatttcagtgacctgctttgccatcgacttggatccttccaattcttagccccattaaaatccccatttaagctcttctgccctgtcacccctccatgaggctccttctgacctctagccgtgtctctgccctgtctctgccttgtctctgccctgtctctgctctgtctctgccctgtctctgccctgtctctgccctgtctctgctctgtctctgccctgtctctgccctgtctctgctctgtctctgccctgtctctgctccaaaccccaccagtggtctccatcgaagacccctttgaccaggatgactgggccacttggacctccttcctctcgggggtgaacatccagattgtgggggatgacttgacagtcaccaaccccaagaggattgcccaggccgttgagaagaaggcctgcaactgtctgctgctgaaggtcaaccagatcggctcggtgaccgaatcgatccaggcgtgagtgcctcctgaccctgaggctcaccatagcctgcctctgccccagctctgcccactccagctacagtcttacccaccaactccaagcttacctttcccctggcacctgacttacccacaccttgatctcaagactttgtttgactaatccttggcctgactccaagagctttgcccctgtggctctgtcatgaccccccacccccagcccacaccattcctctctcagattccgctgttctcagcagcatctcaagagcccgaaatcaagataagtcttttcctctcctacttcccaaagaacttagtcactgccctccctgcagagtgcttgctacccaaaacagaagggagaggccccacccaacccctgctttcccactgaggaggttctagaaggccacatcaaatgtcctctccactcaggtgcaaactggctcagtctaatggctggggggtgatggtgagccaccgctctggggagactgaggacacattcattgctgaccttgtggtggggctctgcacaggacaggtacttgtagcttctctctactgagtgtctcaccaagttttcttggggtccctggcctcctgcctttgaggttaatgctcccttggggccaggtccaacccctcctttccagcctcacctaaccctccaaattcttcttccctcatcagatcaagactggcgccccctgccgctcggagcgtctggccaaatacaaccaactcatgaggtacagcgggaacagtgggcctgggcattggggtgctggaggctgttaggttggaagttcagcagccctaaccttgcctgcattctaggatcgaggaggctcttggggacaaggcaatctttgctggacgcaagttccgtaacccgaaggccaagtgagaagctggaggctccaggactccactggacagacccaggtcttccagacctgcttcctgaaataaacactggtgccaaccaagacagctgtgtgcttctttgtgggagctaggggatgctggtttctgggctgagctggggaaaacaggaggtggcgagatgggggcggggaggggaggcaaatagatatgtaacctgctaggacaaagaggaggtgagggactcacagaggaagctgggtggttctagaacaacagaggtgttcacatttccaaaggaggtaggggaagcagatgctatatggtaaaatgaagctgcagagttgccaatggagccgggcatggtggcgctcgcctgtagtcccagatacctgggaggctgagttgagaggatcgcttgagcccaggaggttgaggctgcagtacactatgttcgtaccactgcactccagcctgggctgcagagcaagaccctgtctcaaagcaacaacaacaaaaaaaaacaaaaacaaacaaaaaaactaaataaagagtttcagagggaataagaaaccagctccaggagaggggagcagggtggggactggggtcctgccaccaccatgaaggggaagctggctgtgaagtaaatggtctgcagaggatgctagagtgaggctgcagtcctagggagggctttgtgaggatgagagtgataa[145 bp omitted]accccatctctactaaaaaatacaaaaattagccaggcatggtggtgcatgcctgtaatcccagttactcggaggctgaggcaggagaatcgcttgaactcgggaggcagaggttgc[133 bp omitted]tgcaattgttcaaacagctctgtcagatagctgccataattatccttattttataggtgaggaaacctgaggcacaaaaggttaaatgccttacccaaggtaacggttggcagctggcagggctaggatccaaagccaaggtatttgactccagcgattatactctcatgtatttattttgagccagcttcttgatctgtcacccaggcaggagtgcagtgatgcgatcatagttcactgtagcctcaaactcctgggctcaagcaattctcttgcctcagcctgcaaagtagctgggactacaggtgcacaccaccaggtatggctaatttttaaattttgtatattttattttctttttgtagagaaggtttgtggcctagactgatctcaaactcctggagtcaagcgattctcctgccttggcctcccaaagtgctgggatcgcaggtgtgagccactgcgctcaaccaattttttaattttgtagagagaaagtctcactatgttgcccaggctgatcttgacctcctgacctcaagtgatcctccagccttggcctcctaaaatgctgggattacaggtgtgagccactatgcccagcccgattgcactcttaaaatacagcatcttacaaaaccctctgggccgggcacagtggctcactcttgcaatcccagcactttgggaggctgaggcgggcggatcacctgaggttaggagttagagaccagcctggccaatatggtgaaaccccatctctactaaatgtacaaaaaattacccgggtgtggtgacacatgcctgtagtcccagctactcaggaggctaaggcaggagaatcgcttgaaccctggaggcagaggttgcagtgagccgagatcacaccactgcactccagtctgggcaacagagaaagactctgtctcaaaacaaacaaacaaacaaaaaacctctgatagttccaactggccatctttaacctacacaaacagcaattttatgctgttcaactgaaaattattccccttcttctctaccagtggttccaggacccacctttctgtgtataaacaaaccaggacattgggttaaacagtatttattgaatgtaaagtaccccagccccatggggaagaaaattccaagaacggggaataatacagattaaatacccacctgtgcattcacactctcacacacacacacacatgccacgcacatatccaagctccaacggtgacaaatcaaacacctgttttcccccagcctgagggacagctggtaggaggtggttcagaggtggggctccaggatgggctctaatagcagcagccttgtctctccctgccccctgccctgccccaggggtcaaagggagctgggcggggcgcctaggaggttggcggcaactcttccccactctgccgcagacgcttcttggctctgatctcattcatagcctcttcaatggagcgtgtgtccctcttattggccacgggcactaggggcagagaggagggtagggcgggcctagaaatccgtacctcagcctccactgccctcctgccgcatcctatgctcctctcccagccacccccagccgcactgtggcctcaccacagccgtaggtcttattggcctgtagcatgtgggctgcgtctttggctgctcccttgccgatgaggtggctgtacttgtccttgtagtcgctggcagggctcaccaccacaggcccctgctgggctgcctcctcctcttgcctctgggccagctcctaggggtgaaagtgggggcactggtgctcagggccccagcccaaacccccacccctcccaggtggtgggcttctggaccccaagggctgcaaagcatagctcaccttcagcttccgcttctcctcagccttctgggggtcccattcctctccacgacggtaagagtctagctcttcatctgagggtgcaaactcctgaagaagagcagaatgatggggtcagagtccatacaaatgtttcatttcattccttggtcggggaggggggataaggctacaaaggggagaggagagaatgaggaattcaggccctttacctttttgaagatcatgacatagcgacagtcatcatcttccccaaaggagaaggatgtcaggccagccacttccaccacatcatgtctgggatgggatggcagaggggaaagagcatcttgagccaggagcgggcctagtgccctcctctggaggagccccccgctggccctttcatgccccgctagccacccatttccttcctcccccagcccagggacactcacagtatgctcctctcgatcttgttcattggctgaaactttttcttgatctgcccactgtcttgaatgaaatctgacacctccttctccatcttgggagaggggaaaggaagcagatatgagacaatggctccacccaagtacccctctccctagctgagcctgggcccttctacgcctccccagcaccctccccagcctccaagccactggcttccatgcgtcacctctctcaagacattttcagcaaaactgagtcctcaaccttccaattttaacttattggaagtccttcctgagtctgcctttgatcactccagttgttctcacccttttacgaaactccactttctgttgtttctcttgctcttgtagtttcttcaggcgggcggcctgttctgggggtgagaaatggcaacatgaagccagggctggaagcatgggtgggaaaggtttctaaggcttcaagtgaagtgtggtgtccactgggaggtgtcaggctgggaaggtaggattagcgtttattcatcaagcatttattgatgtttattctatctaatagtcccccttatccacaggggttcattccaagaccctcagtggatgcctgaaattgtggatagtactgacccctatacatactatgtctttttctatacatacatgcctatgataaagtttaatttataaattaggcacagtaagagattaagaataatagaccaggcatggtggctcacgcctatatcccagcactttgggaggccgaggcagacagatctcctggggtcaggagttcgagaccagcctggtcaacatggtgaaaccccatctctactaaaaatacaaaaattagccgggtgtggtggtgggcgcctataattccagctactggggaggctgaggcaggagaatcgcttgaacctgggaggcagagattgcagtgagctgagatcgcgccattgcactccagcctgggcaacaagagtgaactccgtctcaaaaaaaaaaaagagatggccgggtgcagtggctcacacctgtaatcccagcactttgggaggccaaggtggatggatcatgaggtcagaagatcgagaccatcctgactaacacggtgaaaccctgtctctactaaaaaaaaaaaaatatacaaaaaattagctgggtgtggtggtgggcgcctgtagtccccactactcgggaggctgaggcaggagaatggcgtgaacctgggaggcggagcttgcagtgagcagagatggcgccactgcactccagcctgggcgacacagcaagactccatctcaaaaaaaaaaaaaaaaaaaagagattaagaataacaataatacaatagaacaattataacaatgtactgaaataaaagtttgtggctatgctctctctctctctcaaaatatcttactgtatataacagttctggactgcaggtaactaaaaccttggaaagcaaaaccttggataagggagaagtagggactactgtatctggcaccaggcgagaccctgaagtactgagattattaagacacaatgtggcccttcaagagctcccagtttagtgggagtgacaaagatcagaataatgcttaaccccctttcccaactccactggggaaaccaattaacaaatatctatttatttatttatttttgagatggagtttcactctgtcacccaggctggagtgcagtggcatgagctcagctcactgcaaactccgtctcccaggttcaagcgattctcctgcctcagcctcccaagtagctgggattacaggcatgtgccaccacacccggctaatttttgtatttttagtagagatggggtttcaccatgttggccaggctggtcttgaactcctgagctcaagtgatccccccgcctcaccttcccaaaagtgctggaattataggcgtgagccactgcacccggcctatttatttttgggacaggatatcactttattgcctaggctggcgtgcagtggcacaatcacagctcactgcagccttgacctccctggctcaagggatcctcctaccttagcttctcaagtagctgggaccacaggcgtgtgccaccatgctcagctactgtttaaaaaataattaaaaatatttgtgagatgaggtctcactatgttgcccaggatggtatttttattttattttatttttatttttgagacggagtctcactctgtcacccaggctgggtgcaattagcacccagctaatttttgtatttttattagagacggggtttcactatgttggtcaggttggtctcgaactcctgacctcgtgatccgcccgcctcagcctcccaaagtgctaggattacaagtgtgggcccaggctggtctcgaactcggcttcaaataaccctcccacctgggcctctcaaattgcttgaaagccttgagcctctgcacccagccttggctaatttttttttttttaagttttctgttaagatggggtctcagtttgttgcccatcctggtctccagttggcctcaagtaatcctcccaccttgaccttccaaagtgctgggattataggtgtgaaccaccatgcctggactatagttagttctttgtacattgtgggcattaaataaatgtttgggctgagcgtggtggcttacgtgtgtaatcccagtactttggaaggccaaggtgggaggactgcttgaggccaggagctccagaccagtgcaggcaatatagtgagaccctgtctctataaaaaataaagaattaggcatgatgatgcatgcctgtagtcccagctactcgggaggctgaggtaggaagatcacttgagcctgagaggtctaggtgacagagcaagaccctgtcaaaaacaaaaacaaaaacaaaccataatgcatctgggaaggtgaggaaaacagactaagaccctggcctcaaagagtctgtcatctcgtttacacaggaaaggggaatttttttttttttttttttttttttgagatggaatctcgctttgtcgcccaggctggagtgcagtggcacgatcttggctcactgcaacctccgcctcctgggttcaagcgattcttctgcctcagcctcctgagtagctgggactataggcatgtgccaccacgcccagctaatttttgtatttttagtagagatggggtttcaccatattggccaggctggtctcgaactcctgaccttgtgatccacctgcctcggcctcccaaagtgccaggattacaggcttgagccaccgtgcccagctggaaaggggaaattatttaactttctatattttgtaaaatcccccacttcccacttctatagacaggatgaagctgaaatagataatctgacacccttctcctttgggagtgtaggtgtccaaggttagctgtgaagggtcttctttttctgaactcttgggctcaaggtatctgcctgcctcttgcctgaagatgcccgagaccccatctttacagaaaactttttttaaaaaaattagccaggtctgggtgcagagactcaagcttctcaagcaatttgagaggccgaggtgggaggatcacttgaggctgggagttcaagaccagcctcccaaagtgctgggatttcagctgtgagtcccctcgcctggctaagggtcttatttaactttcttcctcttccttagatcctgcctctgcgccagatcccctctgcctctggaggaggaggaagaatttctaacccgggccctccatgcttgcctgtcttccccacgatgtgattttactacctctagagatttgggtgcatgcttcttcctactcctgctcctcagcctgaaatttttttctctttt[139 bp omitted]cctcagcctcccaagtagctgggactacaggcgcccgccaccacgcctggagaattttttgtatttttagtgg[138 bp omitted]cttcttccccaggatctgaatcctctccagctgcactgaacctctccccatcatttatttatttatttcgagacagagtctcgctgtgtgcccaggctggagtgcagtggcgcgatctcggctcactgcaacctctgcctcccgggttccagtgattctcatgcctcagcctcccgagtagctgggattacaggtgtgaaccaccacacccggctaattttttttttctttttctttttttgagatggagtttcgctctctttgcccaggctggagtgcaatggtgcaatcttggctcactgcaacctctgcctcccgggttcaagtgattctcctgcctcagcctcccgagtagctgggatcacaggcatgtgccactacacctggctaattttttcatttttagtagagatgggctttcttctccatgttggtcaggctggtctcgaactcccgacgtcaggtgatccgcccgcctcagcctcccaaagtgttgggattacaggcgtgagccaccacgcccgcccatttttttgtatttttcgtagagacgatgtttcgccatgttggccagcctggttttgaactcctgacctcaagtgatctgcccgcctcagcctcccaaagtgctgggattataggcatgagccctctccccatttttcaaataactccatgcctttgcacacgttgttcctctgcttggaatgcttttcctcctcttgcaaacattgagatctaccgtgagtcagttacttcttcccctgggctccaagctcctttggctgagacacccagcagcatagacagagaactaacgtatcataacttcttttttttttgtctccttcagcatagtatgagctcctggagggcagggaccctgttgatctactgttcagttatcctctggagccccagggcctgacagcttatgagctctcatccctctgtcctcactgaccatcagcgcatttcatcttttgttgttggaaacagtctcaacttcatcgcccaaaatggagtgcagtggcgcaatcacctctcactgcagcttcaacctcccagactcaagcgattctcccacctcagcctcccgagaattgggaccataggagcgcgccaccaagcccagctaatgtttatttatttatttatttatttatctatttatttatttatttatgagacggagtctcgctctgtcgccaggctggagtacagtggcgcaatctcggctcactgcaacctcctcctcctgggttcaactgattctcctgccccagcctcctgagtagctgggactacaggcacgcgccaccacgcccagctaattttcgtatttttagtagagacggggtttcaccatgttggccaggatgctctcgatctcttgatctcgtgatctgcccgccttggcctcccaaagttttgggattacaggcgtgagcccggccaatttttgtattttttgtagagatggggtttctccatgttgcccagactggtcttgaactcctgggctcaagcgatccgtccgccgcggcctcccaaagtggtggtattaaaggtgtgagctacaaggccgggccccactgactgttctttaactggttttcgagtcttctctgcatctagagaagtggcacaagattatggtcaagaacataggcttcgagcccagtcatacctgggtttgaaaccctgccacttaccaaactaaccatgtgacctcaggcgagtgactcatttaagcttcccagtctgtcaatgccgggtgatcccccacttagacagtcatcggagcattagagaattccagttccccattcccatcatgcttcctcctttctcagagatttcaaatagactcttctgcctgtaacgctttgcttctctctctcatttacggaattacctgttctgatctcggctcactgcagattgggggagaacctcaggtggccgctctcacagttatttttctctcagagcacttatcaagttggttattaaacttacgtgtgatcactgcatcaatgagcgccccagccccggactgtggcctccctgaggggtacccctggtccctaacggttgttcaagaaacaaggggacgaagcgtaggcaaccagcggcccttgaatacttggaaggcgtcctgcctgctctggtccccctggggcacgtggggagctgggacagggctcgtccgtggtcaaggtccgcaggtttgggagttggggtcctgcgttccgccagtatcatcccaagctgcaacacgagcagccccggggaggctcccaccgccctgcagggccgcgccctacgccggccgccgaactccagcccacccgcagggaagctactccgagaacgcaggcggagacagtggccaatcggacccggcgggtattctcatccctccaatcaacactacgatccgcccgggcagctcgggaatttaaggctacggatgggaaaaaggttgtcggagggaggcagaagggactgggttaaattaagcaggaggggcaagaacacacagaggaccctgcaaccaatgggaattcgcaggctggggtggtttcgaaggaaggtcgaacaggcctgaggaggcagagctttaagttgagatagccaatagagatgaaggcacagtagatggcgtgtcctaaatccaatcgaaatagagctagaggtgagcggggcaggaatgcggcaggttggaggcaccctaccaatcagaccaggtcagcagcggacaggcgggacggccggctaatgggaaacaaggactgcggaaggccagggtcgggagaagaggcaggaggctggcgctatctttcaggtagccaatcactgtccgctaagaacagcgggcgtgtcagcagcccttttagggactctgagggtctcggaaggggcctgtgaggggtctttcaaggttgaggaggcggcatcgtccaaagagggagaagtatggtcccgagaaccgggcgaaggaaggcggttgtgaatttgggatcctcacctcgggccttgcgccgagtctcctggtcaccgaggctgggtggcttctccatggagctcaggatggagcccagtaggtccgccatcttgggagtgactgagagggggcggtgcgtcttaaagggaagggcggaatgcctttaaggccggaaacacgtcggaggcggaaaaccctgggcccgcctggcctgggcgcagatcccaggcccgcggtgcatggcggcctccagctggcctaggccccgccccgcccccgcagacagaggccggaggctggctggtgcagcgatgtttaatggcaattcgtataaaccaagcccatgcacaagtagaaagtgcccgtggagccggcaggaggcccccgccgcgctagagaaccacaagcccggccgtgcagccctccccgcggcgccttaaatagattcttcactatactctgtatgttacagtatgtacaagacccctcccctcgggggacggggcggactccgcaacgcgttcctatgtacaccacctccccttcggccctgaggtcagtggccagagtcgggtgatggggtaagacagggccagagagggaggaaacagacgcaaacatgcggagtcgggtggggacacggtcagccctgaaacacgaggggcgtgcgcagcgaaggcagtggtgggaaccgaggcggatacattcagagacgcgtcgaacaaataaataaggcaagtcaggagggggccgagtcgggtgcaggcaggaggagctggggagcaggggcaggcagggctccggaggtcacagcggaagatgcaggtatgtggggcgcgggttttctggagccaggaccaaaagagacggggcacgaccaggagggacgaggagaggggtgtgggagcaaggcgtggggaggagggaggaggcctacagagggctccaacaaaggtgaacaggaaagctgccgacaggggctccccctgccccagaaagccctctccctgttaagactgcacgaggcgcccccagggtggtgagaaaggcggtggccaggtcatgtggccagtcccggctggggaagcccttccagctcctggttctgcttcagttccctcatcctgcagagagaaagataggagtcagaggagactggcggatcacgacgggtggcaacgcaaaagcccagggggagaagggatgagtacctgtgtcggcagcgccgcaggaatctcatgatcttccgggctgcctggtcctgcttcttggtgagaaaggagcctctggtgaaagaaacaaaagatggacctcacagaaggcatcgcatgccttcggcccccccaggaaccctaggcagggaatggcagtgaggcatgatgatcaagaggatgagtaagggggaatggcgtggatgcagtgggtgggcacagagggctggggctgggccctacttgttgcgggcaggcagggtggccgaagtccggtggggagggccgggcctgcggcggtaggagcggtagtgctgctggatgagcacagccgctcggcggctctgctgaaatcgcttctgttcatagtagcttcggaacttgctctggatcaggatggccgcctgggtcatcttcttatagagtgcaaactgcaggggtggggaggagggacaggggctgaaatagagggacggagacccaaagccctgaggctcacccaagttaggctgatgcaagactctctgtaacccacacactcaaggaaagactgaatcatcacagacctcacactcagagctcatgcctaataccttaagtgcaatccaggtcagcttgtggagagagaaggggagttagggctctggcaacattctggaatggttaggcgtgggtgtgggttggtgggttgctggttacacttttgagggagaagggtctcacctgcttgtacttccggtaacagcgctggattacagctgctgctacctcctgctgctccttcagccgccggccctgaagggagagaagtctcaccacctcatgacccacataatggcatatctgacttgtcccttcaactttcctggggttcccctgaccctttaccccatccaaggcctgtctgcacgactactcatcctccaaaagccctgggagcccagtctcccctgactggagattgtgtaattcatcctgagacccctgcccctgaccttgtactttcggaaggccgtctggatgactcgggcagcctcatacagttcccgctgctcgtgatctgatagtgtcagcagggcaaaatcactttccatcttgccactggtggatgcagagagaaactctgcccaggagggtgctgaagggacagccaggcgacctcgctcaaagggcagttcgctgtaggcggtagggaaagagggtgtcatgaagcatctgaagtccctcctctgccacctatggatggctacgaaggaaaaccaccagcaactgagtctggagagtgacttcagagttcatcagccagttcagttcgcttctccaaggccctggggcctcagccagaatggagctttggctgtgggaaagccagctttctcccttcctcccatcttcctttgaagaatctggaggctttgtcctgagctagtcacctgggaggggttgagctggggaaatggtccacattctccaggtagctggccagccaggacatggtctcactgagccccacagcccctgtccgctcccgcattgaggctccagcctcgggcagccccacgaagtcctctcgtttaatccgctccggtgtggcttcgatgatctgcttggctagtgagatcatgtccacctggaagaagggagaagctgagtgagtccttaggggccccagctgccagctgtaacctcagtccattcctatcttgttccttctctccctgccaggtgctgctaaccctgtctttctgggccactgttccagactcattcatttatactgatggggctcccacttgggggtccctctgtgctgagatgctatggagaatataggataaaaaggagatactccaagtggggattcaaagctgaacaaatggaggacttgacaccctttcaggccaaccatccactgtcctacctgggcctgccccatgccagctgaccagcacatgctccccataggcttggctgtgcccacccccagctccctttcaactctccaagaaccattccaacacttgccaactactacccggatgaatggctccagtctggcctttgctccagccctgaagcctatactccagcacttcctgctggacacactcaacacaacctacttgtggagttccctaagttttttgtacttaaagtgccacccacttactccattagtctctctaaagcaggtatgtccccagtctctatcagagaagtacaaggctatacttgaagattcactttcattccacaagactttcttagctttatcatgtgcaagcctccttcctgcatcagatcactgccaaataccctcatcttgccagccttacctctccacacaactcccagctgccctccgtcatcttggttctcctagaaccttgtccctacatagatcaacggttaactcctacaaaccagctctaactgaagatattccctagaatttttgttatagagacagggtctcttgtccaggctggaatgcaatggcacagtcagctcactgcaacctcatattcctgggctcaaggggttctcctacctcagcctcccaagtagctacaactacaggtgtgtgccaccatgcctatttttaaaaaattattttgtgtagagatggggtcttgttatgttggccagactggtctcaagcccctgttctcaagtgatcctcccacctcgttctctgaaagtgatgggattacaggggtgagccaccgcacccagccagaatattttttaatgctttttatattttaaatcttactattttgtctttttttttttttttttgagacagtctcagtctgtcacccaggctggagtgcagtggtgcagtctcggctcactgcagcctgtgcctcctgggttcaagtgattcttgtgtctcagcctctcaaacagctgggattacaggcacataccacagtgcccagttaatttttgtatttcttgtagagagggggtttcgccatgttgcccaggctggtctcaaactcctggcctgaagtgatccacccgccctggccacccaaagtgctgggattacaggcgtaagccaccaagcccggccaaattttttttttccaacatctgtattgtgggaccagccagaattttcaacctccgctgcctcatgacttccaagtcacatggtctaaaaggagctaagcaaaaggctaccttgcctgtcccaaaatgaagtaaataggcccttcctaaactgaagccagactttgattctgcttcatggaagtcggcctcacccttcctactccacttctagcccccataactccatcaatataagcagtaccgggatcacatccacagcctgtgggctgtcagcgtcctctggagcagccccatcatctgaagctggtgggagggcaggaagggaggagaggggccccttggagttggtagcctcatagtccatgaggagtaggggggcttctgggacaccagaggaaagctggcctggggccatgtcctccatagtcatctcagaggctggcagaggtgcaggggggggactgccatctggggcactagaataggctgacgtgacggaaaaggtgccatccgacagctccgagggcgaggagacgctgctcagacctgtgtggggagggaagagagtgagggcagccggagccacggccatccctcgctcaagtctcctgccttccccatcctgttctcggtccccgtctgttcttgcttctgttatctcccatccctgcctctgtggtttgtctcctctcttactcgtttcccacaccctttggctttgtcctggcctatcctcctacctacatccctctctccaaaagattagggccaccctcaccagtgtctgggctggaggagggtggcgatagggcaaatgggggctccaccgaaggctcctgtctctgtagttcctcaaggcagcgggcaaggcgcacatgaccccgggaatgagccacagacaatggcagacggcccagagagtcgggaatgctcagtgcctgtcggttccaacggaaaaggagcacagcagcttccaggtgtcccagggcacaagcccacatctgaggaagggggcgggacaggcggagacggaggtggaggtgaggccaggggctcttcctccaggtagtcaggtcttcaggccccagcccaccccactccctgcattcctcaggatcttccttttcaagggctgttcccattgctccctgccccatatgcgctcaggaatccgtcatcctcaccagaggggtgcaagagaaatgatccacgttgagcgggtcaacctcctgctctaagtccaagcttccagtctccacactcctggagggtttgggagagagacagcagagcccaatgagggaaaaagtgggcaaagcaggaacatcagaagtaaaggcactaggaggcaagctgtacagggccggtgggaagaggcagtcaaggacactagcttaaggaggtcaagaagtcaaagtgttgtaagtcaggatatgaaagttccccaaaatataagtcctctcccaaccccctcccttcccacaatgaccccaactccctcttggtagggccccaggtcctccaattcctcttcagtcccctgacacttctgtcccagaggctgcccagccctcacccagctgcccttgctcaccgccactggctcagggtctcgatgaggcgggcatagccctgggcagcagccaggtgcagaaggctcatgccccggaaggggcttccatgggccagacgttcaggacccttccaggtggagcgtgggatcatgctttctaccaagaccactacccgtgcttcgaacccaggcccctggccttcatcctgcgatatacacactcttaggcagagacccaggtatctactcccctggcttgaggtggccttggccacctcacatctgtcctcccagcttctaattttgccccctccccacatgtcccactctaggatcccatcagttgaagttcctctgtggcctgtgtctcttgctcccacagccacttcctccagcagccagacctcacacaatcttgcccatgtgccttcccatcagctcagattagtgccatgttcacacatggcttctccccctcagaagccagagccttctctgagccttagccctcttctttcagaaacttgggacccacagagatctgagccccagtgctcctgacccctcccccgccctctccttcacctccacccttcttcagaccagaaatagtctgaagcccgtcatgccaagagggtgcccagaatagccactcttgccacaaggtggggatgggaacagggtgacgtcagggagagggaagacaggctgaggaggctggggacaggagagggaggagagtcatgggcactagatgttttctttagctgtgtcctccccctgctccccaccgtagaccacctccctcctcacagaagtacctgaactggaggagcatcaggaccctggcaaggcacctgcccagctgctgcgatctctgccatccgcttctccatctgctccagtcgctctagtatggacatccggaactggttgtctgagggggaacgggtatgggaggctgagtgggcagtctaggtgatgccctgaacaccaaaagtagacctgtcccaagatctggggatgaggacacagaaccatattcttttatcttccccaaaacaacagctcctttaccccttcacctaaataaagcccaccaggactcagtccttaaactagggctgttaatactacccactgatctagaacccagatctggaaccaaaactgtttccttcaaggtacagaggtagtaggattcccaaatggtcatccagcctccagatgtcccaaatcccacccgtacacactcttccccccagccttttcctaggcaaaatgttctgtcaatttttgcagcagacactacctttgtcccccatggtgaaggtgaaggattccagggtccctcccttttaataaccactgccccaaaaagctcagggactgtgatttgaaaagtacctccccttcctcccagccccccgcagctgtccacaaagacgatggtgggggacggaaggtgacagagatggatagccatatagccatgtccatttctcctcctcctcctccccgccccatatacaaatacgcacgtacacacatatccccccaagctatatctgtcccctcctgagatcaaacaaggacaagaaggggaggcaggaggggatcagagctgtaggaaaacagacacaaacggtgaaggttggagatgttctgagatgccaggatagaaggggatgaaggtacacaggtgataggaggacagagaatgatgaacagaaacccaaggaaaacaaagggaggagagagagcaaaaaagataaagtgaaggagaggagagaaaggacaaaggagggctgggggaaaagtgccaaacaagcagtaagaaaggacgataaaagacaggcaagttaagatattggttcaagaagaaatggaaagaagagggatggaagagactcataggagagacggtaaaacgtagattagacagggacagagaaataaggtgatgaacagtcacagggcaggacagagacagaacaggactgagaggcctggccagatcccaaggtaggcagactcaagtcagagacaagcaacccaacacactcgggctttgtgtggggtccagctccaagagtgaggcgaaactaaggaccagagctccggagagagagaagtaaggacagagggagactaagataacacagatggcagcagaactgagagaagccaagaggcaacaacaaagacaccaagaggaagagatagagaaaagctaaccttgagaaagcagaaagcagcaggtgcagacagaaacaatgttcaaggccacaagagagagaaccagtaacaggaacaaaaactcccagatttaaataaataaatacacacacacatagatacacgtatgtatgtgcctctatgtttgtgttagtacaccatgttattagcaatggat[137 bp omitted]tgtctcagcctcctgagtagctgggactacaggcacccaccaccacgcctggctaatttttgtatttttagtggagacagggtttcaccatatttgccaggctggtctcaaactcctgacctcaggtgatccacccgccttggcctcccaaagtgctgggattagaagcacgagccaccgcgcccagccagaaatttttattttctattttgtgcttttgtgtaatttccaaatttctgttaatgaacacgtctttatatcagaaaaggaaaaacaatagaaatttaaatatataagtacagccgggtgtggtggctcacgcctgtaatcccaacactttggtagaccaaggcggggtggattgcttgaggtcaggagtttgagaccagcctggccaacatggcgaaacctcatctctactaaaatcacaaaaaattagccaggcttggtggcaggcacctgtaatcccagctacttgggaggctgaggcaggaggattgcttgaacccaggaggtggaggttgcagtgacctgagatcgcgccactgcagttcagcctgggagacagagcaagactccgtctcaaaaaagaagagaaaaataaataataaataagtacataaacttgtgcatagcacctatatattgctctagaccctgtccctgccctgcctcttagccttccttgtctagattccaccctttgggatggagaaggcaggtcaagaactggtataaaaatgaccccaagatttatggggaagaggaggtaagggaagtttgctgccacatttagaaatcactaatgaaataggaattgaaaaaaaaaaatggtaaagtgggggctcagtgatggccacctgaaccctgagtggtctaggagcatgtcatgcttaaaggctgtgggctggatacttgggttcagagggctgggtactcaccgtccagtgacagccagtcaagttgagtactaggcagagacaggaatcggcgggctcgatactcaaagagcacagaagcagaaaggggcccctcccgccctgccacctgcaaagacaccagccctacctcatgggctggagagggtaggatcagcgagaagggctctctttccctggctccttctctggctacctgtgtcagccacagacaattattccatagttatttcccctactgccctgctgtgggccaagaggcccctggcttcagtggccttggcactaactgggaagggagtccatttgtttgagaacttaatacgtactatgggccagagatcccttggattctagaccctgtagttgaagatatttgttattcagcaagaaggtttggaaactgagggtcaagagactagttatgaacaatttgatgttggaaaatcctcttgatccccggatcagagtctggaagttatgaccctgttactgagatggaggaaaggggagctagccgctcatgaacagtgtccagtggccataagcatggaaccagcaggccctgatcctaagaccaggtgctgagactttttctcccagtccccagattctctggtctcatcccctttccttacacacatgctggatgctgctgtagagactgggggagaacacactcgtagacagcaaagctgccaacctgtcactttggtggtccttgaggtcccctagtaaggctgatttttgagtgtagggtaagggcaaagctggtggcaaaagggcagagatgaaccttggcaatgaagtctagaccagtgctgtccaatagaacatttctgcagtgacaagaatgttctatatcgtcactatccaatagggtaacacgagccatgtgtggctactgaacacttgaaacatggtcagtgagactggggaagtgaattttaagtattctttaactttaattaataggcacatgtggctaatggctaccatactggacagcacagttctaaaagccaatgtccttcagtcccaagactggttagaggaaacccacatttcttctttctcattccccctggattggagttggagactctggctctaagccagaaagcctggacagacattagaaatccctttggtcaatgcctaaccttacaggagaggaggccaaggacctcaggaaggatcagactcatctgaggtcactggttagctaaggagtagacttcttggaccagaacctcgatcttctgacacctaagtctgggctcttctgcctgctgggagagcttggggctcaacctcaggactggatgaagtccttgtgctctcaaaacaacccatttgttcccagtgctttctggaagcctggaggtcctgatctgtcctaactgcccacatgtcagtccctccccctacggttcccaatcctcataccgggacagtagcagcgtaagacaccaggctggacaagtgaggctggcactgcgatgtgatcaaagacacaggagtaatgctcggcggcttcggtccaaggacctgtgatgagcaccttgaccccaccctgcagacagaagtcagagaccatgtgactggagttgggcgttcatcccctcactcattcatttattcagacccttacagggtatctactatatggcaggtcctgtgctagagtctgggggtccagggatagacaggacccagtggggtgaggtcagtgagtctatctctccccaacattcctgccaagtggttgcctggtctctacctgaatctgccagtagctgggaattcagggcctcccccaaagctaccacagagctgtcaccagaaggaagttctgttcttgggctaattcacccccactgtacttcctccttttcctctcaaaggcagcataaaacagaacttctccactgctgaagacagtctttcagctactcaaagtctgcaatcacatccctgatgtttcttttcttctccaggctgcacagccccaattccctacccctgaaaacagtcaggaagggaatgaggtcctaggagactccagaaaccatgctaacacatggaagggagaggaacagaaaaaaggttaagttgctgaggactctggaaacaggaaagcag[132 bp omitted]aaaccccatctctactaaaaatacaaaaattagccgggcgtggtggcggtcacctgtaatcccagctactcaggaggctgaggcaggagaatcgtttgaacccgggaggcggaggttgcagtgagccaagattgtgccattgcactccagcctgggcaacaagagcgaaactgtctcaaaaaaaaaaaaaaaaaaaaagagagagattaggtagaggactaagaagcctaagaagccatgaaaactgagggaaactaggtcacagaccacggggtaagagttaatacaatttgttttggggagtcagaagacaaataggagggaggagggaggaggtaagcctgagtctcacctctgggtaggaccactctggggagaagtctgtgatggtgctaagagcaggagacagctggggggtcggagcagggatgcttggagcttcgtcactgatgagttctcccataaggtctgggaatgatgaaagactgaagggctccagttcactggccccaacaggtcctccaaacaaggcctctcctcttcctaccctgcttgacggctccaagggggcaggtgagggtgggggtgagggagggggtgaaggtatgggtggggcagccccgtgacccttgagctcctccccactgtcatcatcttggatgaagaagcagtttcctcttctcccacctgctactgactgtggtgggggaccccgagcagctgcctggggctccagggcagcagcaggctctagggcagaacagggggtatgagcggcctctgcctcggggaagtctgggcttactccctgcccccctccatatgtctggcccctctgggggctgttgagaaaacgatcagggtcaaaggcaggactgggaggagctggtggggcagaaggctcagtgcctacaaccactgccaaactcatggaaggcctaggatcagcctgtggagccaagtgcctggtgggcgtcaagcctccagcccgctgctccagtcctgtcaggaggaggatagcagtgcctcctcttgaagaaccccctcgagaagtgggagggctaggtctgatttctaggggctctgcaaaacctgatgaggaggaagaagaggaagaagatggggaggtgtgtgccttggggagctctgggggaagtggggctatcagtggaggaggctctggggggtgagcgtgggggatagaggtcagggttaaagctcggggctccactttgggagagatgatgcggtgtttcgtgctgctgcatttgtgggtaaggctcccagaacctggagtggagaggagtaggagggagaggagataagacacatcattccgcaccttctctaccttgaggcccttaaaagtatttcctgggacgtccctataaaccagaggtgtaatactgattgtagccactgggaggcatcagaaatgtctgttctctacccctaccctttattccccctccccctctccatttcccctcaaaacaagcaggaccagaggaacgctccagagaactgagggcttgggagagtagctaaaagcaaaagttaaaggcataggaaaaggacaaaagaacagaaccaagggggtgccaactaggaggaaggctaaggctgggtgtcactggtggtgctgaggggacaggaattgctgaaggtagaagacaggaagggcagaggctgccatgacagctgagtgcaaggctgattccgagccagtgtgcacccagatgggaacgtctgttcatctggcccatctttctgggacatgcaaaagacttgcaaatcagcatgcaaatcccatcaagatggatatccccctggcttgcgtaagagcagtgtggctaggtgggaagacagccaaaaggtcagggagtaacttaccaagccccccactgcagagacaggcgtgggttcggggagcaggcttggttgggtgggtgtccaaaatctgctgcaccaggtgttctacagagaactcttctgttccattcccgcagctccacttgatgccatgaactagagaagttagggggaagtgctgtgggatccccacgaaacaggccccagagtaccttgatggctcctccaagcacctgacatgcttcaagacttctggccaggtgaacagaggccagcagcctcaagactgctcagatatgttgctttagtcctttctccgtattctaatacctgagaacacaccgggaatcctagcaccctcccagcttggagggagatgatcagccctcaggctttgggtccagaaccatggcccctctgggagccctgtttctactctccccttggagctctatccccaccctgctgccttacacatgggcttcagctgtcccaacaactcctcccgggaccacttcagccactctcgacggtcgctgctgatggaacaaaagatggggctgcagccctttccacagtcctccagggctgggacgttcaggtagtgcacaaggacgatgtcagggttctgagagtataaggggacacacagagccatggggtcctgaggtccaggggcttggcttcctaatcctcactttcttcctgggcaccctcctaacctcgcccccaatttctgactctctccatccccaagcccctttctcttcttcccaggctcctttcctcactcagaactcagccatcctttcacttccttctttcagacccgtgtccctcaaagagtcaggaagagggtggctccctgggctcttccgtccttacctggagcagccagtagcagcgccgatggaatgtggggacgatggaagagtgaacgtagcagccatagagacactgccaggagacaggctggggtggggggagggctagtctgctccccaactcttcctctgttcagtccctttgcaggaatcccaatctttccaccagttcctcttcaacccttcccccaccctcgcccccacctattccccaccccttttgaatcccagccaccctgagtcatagatgagcagtggggctggggccttatagtgaggaccagatttgagatacgggactatctagaaaccagagggcagagcaagaatgcatctgagatgaggggcaatgatttggggaagagaaacctgtgctgagagcatcattgctgggatccctgagggaaacacaagagcagtgaggggcctgggcatcagtgttctggaagggaggcatggcctacggcctggatagttgagtcacggagggaaatgggaagtggagagtggccaaagcaatgtcagccgacccaaagtgagtgagaagggaagagtaactgggaggggactgaggtggacaatgccaccaagcccaggtcgggctagagcccagctaagggtggaggagggcaggctcgggaagatgagctgaatatctgactctcttacctccatgccctggaccttcagcttcatgtggtcctctcgggtggtcttcccatccttccgcttcttccagaggtaaccatccttccgatatttcaccttcttgcgattgtagaggatgatggagccattctgaggcctgggaagggaagggttgccctggagttctgtgaacagaacccaggacccctgccactcccccatgttctcaaactttctcaccttgtctttggggcacaagacagccactcatcatgcttctcaaaggtgatcaggtaggatgcaatctcctgtaggagaggaggcactcagctgggcatctccttcacagagagtctcagcctggcctcttggtcatcctgtcagtgtctcactctctgctgagttctggcagctagtggaggatgcttctaggtatctggacccagcaagacccactgccctcctaagaacccttcttttgtcctaagacaaaagtctaacatttttttgtgaattattttactctccaaaaatctcattcctgtgcccctttttttttcttttgagatggagtttcactcttgttgcccaggctggagtgcaatggcgcgatctcagctcactgcaacctctgcctcccgggttcaagcaattctcctgcctcagcctcccgggtagctgggattacaggcatgcgccaccatgcccgggtaattttgtattttttttagtagagacaggatttcaccat[139 bp omitted]caggctggagtgcaatggcatgatctcagctcactgcaacctccgccccccaggatcaagcaattctcttacctcagcctccagagtagctgcgattacaggcacttgccaccgtgcccagctaatttttgtatttttagtagaaacggggtttcaccatgttggccatgctggtcttgaactcctgacctctggtgatccgcctacctcagcctctcaaagtgctgggattacaggcatgagccaccactcctggcctctgtgccccttcctgactcaaaaaatttcagtggtttgacactgccaggaatttcagattatttatttatttatttatttttttgagacagagtctcgctctgtcacccaggctggagtgcagtggcgccatctcggctcactgcaagctcttcctcctgggttcatgccattctcctgcctc[221 bp omitted]caacaagggatcaaactttcactgttcccactatttacccatattgctcctacaattcctgccagatggatccattgattccttcctgaacatgctttgaatagttacctcctgcatgttagtgccctacaaggcaggtaccatgtgcacacctctccatatctggaaatcatagccattctataaaccaaaccccttttcagatgctccatgaagccctgctgaccacactggaccttcctaaacgctctatagcacttacaacaatcacacatacacacatacacgcatcgttttactgacagtcctcttctgacatcaaattgataaatatcaacaaccaactacatacaaggcagtaagtatgcagaatacagaaaatgtgtaacacaaggactgtgcctcctccagaaagagccagtatcagtggtggttaataacaaaggttccagccgggcgtggtggctcatgcctgtaatcctagcactgtaggaggccgagatgggcggatcactaggtctagagttcgagaccagcctggccaacatagtgaaaccccatctctactaaaaatacaaaaattagccaggtgtggtggcgtgcctgtagtcccagctactccggaggc[144 bp omitted]ctgtaatcccagctacttgggaggctgaggcaggggaatcacttgaatccaggaggcgggggttgcagtgagccaagatcgcgccattgtactccagcctgggcaacaagagcgagactccgtctcaaaaaaaaaggccctggagtaagttagataaactatgaggtaaatcagtttcctcatcaataacataggagcaataacagggcttgctctatagaaccgttagaggattaaatgagacaaggcaggccaaatgtttagcacggtgcccagtatgtaaggaatactttactggcagtagcttttgtttttacccaggtggctatgccacagaaaagagggctccttcaagatccatgtctttttgtttttgtttttgagacggagtctcactctgtcacccaggctggagtgcagtggcgtgatctcagctcactgcagcctccgcctccctggctcaagtaattctcccgcctcagcctctcgagtagctgggattacaggcgtacatcaccacgcctggctgctttttgtatttttagtagagacggggttccaccatgtttgccaggctggtcttgaactcctgacctcagatgatccacccgcctcagcctcccaaagtgctgggattacaggcatgagccaccatgcccggccaagatccatgtttttatacctctcctaggatccccaaagagcttagaatggtgctctgcacttaggagtgttgacagacacggaaagaccccccactcaccctcctccagcctactaggtcttgctgggccccaacccccagcctccctagaaaacctcatttgtattccaccgtagcctctctggaggcagcagcgggcagcgaggaagacactccagcagcttcttggggagaaagatcttcaggtggtggctgttttctaaagggaattagaagggagggtttagtgtgctaccctggggcatccctgtgatagtccaaggggaaagggctgaaggcaatacagagcactggggaaaactgaaacctcactaaggagaacagaaaatccaagaattagagggccactaaagcgtggggagaacgaaaggctgtggccacattgggaacctggtttgtgaacttaccagcaacctcggtggtgtccttggtattcatggtgagggctccagggggcaaggtcacccccggcctgaggggccggggggagggggagtctgtgctgggaagggagagaacaaggtcatggcagaagcccccacattaatccaggatgagaagtatgaggtagggagtgggtatagaactgggtcatagtatctgggaaggatgaggaaagggagggaggggctgactgtgatgtgacagtagaagagagaacaacacacagtgcccggagccaatatgagtgagcagactggacaggaagagtgagcaggaagaaatgggttggggtgggggagcggggagaagactggcagggcttgggcctcagaggccctaaaccttgagcttttgcacagactggggctatggttgggtcaggtcctgggggttgggactcaggccatccggtccttggaggatggtttggcaagagagcctggatcctgggggcagggcaggagattctacctccggtagaagctaggcctttagaagacacgccctgagttccttctctgtttgatttttccaaggggaagggcagatctgataactgaacctaacctattctctcctccaggttggttaggacctgatagaatctgggccagacacccagattcccaccctcaggacaacccaccctccggctgacagccctctctacgtagctccctctccccaaacgcctctgcctcccctggcctccaggcctagcctaccccatctaccgctctggctccagcctgagccccccgccctcctcggggaacagatgggagctggcggaggctctcagcacgggctccgccaggtgtccaggatggagatgggaggaggcccgtcgggctcggctatgtgcagtgaagctggggttggggtaaggactccgccccagggcgcaggtgcgcagtcctggctaggcagcctgccagggtgcggagcgggagcgggtccttgggctgcacttgggcggcgccggatcggacgcttggcactctgggcggccccccggcggagtggtggtcccaggagaacctccgaggtgggagggtcccgcccgcatagagggatgttctggagaagccgggagcagagtccgcgggcacgcggtgggcgagggacagtgcaggtgccgggtgcgggggtctccgggacagtccccggcacgcgctggtccgccgtggggccctgcggtgagcggcgccccctggcgcgggggaggaggacggaagcgggaggtgagggcgaaccgggaagagggacggtggtccctggcgcggcgctccgcgtcgggacctggaggagctgcgccctctggcgcgggggcggagaggcgggcgagaggccctggctcttacctcccggggtcccgcgggtgacggcggcagcggccattctaccccacaccgaccccccccagcgccggctgacagcggcgtctaacgtcactgcgcacggggcggggcctcccaattaaggggatgagggtcaggaagggaacctggggtcagcacacgtggagttctgggtggggcgctgggcagagggactcggcttctagggctctgagccaggccgagggacagactgctgggaagtccccaaaagggcagcagcactgaggggcaggattccagggtcctggaggcggaagctcggccgactgactcccagttcgagagaacggggcgggggcagcccaccagtgctggaacccgaggggccgggcgaggaacgctggactgggagcaggacccttctcgcctcggacaagactccttgtctggggacccagcccgacttcattgtagctgggtcctcgagaaagcgaaaggagccctccttccccattggcctctccatcgctgcatcccaagaagaaagacaactcgggctccacttgcttgctttttaataacagagcagagagaatacaaggccaggagcggggcctggaggaaaacaggacttggggtgctcctgtgagagcggtgggttgagatgggagcccacgggggctgttaatgcctagttcagaggatgggaaaggcagttggagagacgaaggaaggggaaacgccttcatgtcagcaatgagggtgactctagtgacggaactagtcttgggtccctggggcaccactagcctctcggcatcggtggtttctccttactcttcagacgctgccaactccatcccccagggattgtgaagggggttccttctggctgtgacagtgctgaacgaggccagagagtgcagctgcctggaggcacaagcctcctcctgatccagggggctccagggagaccaaagcagctgtcaagatgagagaaattgaaaaagaaaatggaaaagtaggtcttctttccagatttcctagtacccaagcttaggtacctcgaagtctctggttctcacctacgttatttttgtttctctcaaatccagctctccagcctggctctcagcttctgcatctccatgcaagaccagagacccacatcactccctcactccacccagttccactccaacaatacctgggccctgccaggagtgagaaaacggtcctcttcctgtggataggttgctctctcctcttccagatcagggtattcattggtgctggggaatccacagccctcttcgccaagcaccactggctcagatgcagccccagagctgccccactgggccttcttcagtctgtggagactttaggctgaggagagaagtgcctggaggccaggcttcctgtctctccattcttcacctttctgttctgaaatacttcctgctgggactccagggagttgtcatttgacctttaaccctccactcccaattttctgctcccctcagactgaagcatattgtctaggaacccagaggtgaccccaacctccccactgtcctccagttctatggtttgctttcctgtcttcagtgatctagtttccactccttccagctcatgtggctcatcctccttactgcagttccctccttctttccatattacagaaatctgtttcaatcacaccaaagcccacagcttccttccaagcaacctcccctcaaagctcccctcaaacctcccctcaaagctgtcaaccccttccttagctcaaactgttctgcccccaaatcctgcatgactcccagaacccagatgtctcccttccttactcgttgatgatgctctgacgccttcttaggtcctccaggtggtaagtgacagccctcacccgggcggggactcccccaaggccctgctgctgcattccttccaaacatggcctcctcttctttcttctccaaagcatttcagggggtgggagctgctcaggaggatacagaccaagctgggagcaaccagtggctctctgtgccagagaatggggaaaaagagctagaaagaagaactggctctctcaagggagcttggattgaactaggtagggagtctggggtcttgggaagacccctgtgatctcgaaaacatgatgactgattcatagaaaggaaggcctggtcagtgcactggttggggaataacagagggaagcggtaataaggagagcttgggacaggacagcagtgggtgcaattttaacagagaaatgttaaacggcagagggtctgtcttaccagcatgggtggaatgtgctgctcctccagccaagtggggctgtgaagaacaaaaagggggctataagtgcagaggggacatgtccatccatattgcttctttaataatctctcccgacctcctttctgtcattaggagctacaatgtccaccagccagtgggaaattaaccgcagactagggcctattgctatatgggtttatggtagtttaatccagttaagaccacatccagttagtttccattttctcctctactcacgtgggcctttgattaaggttcttccagaagacatctccataacgctggggcatgggtctgaggctctgggaaggcaaccttgggggtggagatcggctgaccaccctggaacacctgaggtgaggacaaggtaggctcgggtctggctcttcccttacagcagtctactcatcccaaggattcaggggccatctttccatgggactataaagctgcccaggttccctcgggccatgtcctctcttaaccactttagctgaagaaggtggtaaggcctctgctttgaaaggaaattgaagctgggttgagggtggagattggctatagtttgaccctcagatctcactgagtttaagctctatatcggggatgtccaatcttttggcttcctgggccacattggaagaagaaaaattgtcttgggccacacataaagtacactaacactggccgggcgtggtggctcatgcctgtaatcccagcactttgggaggctgatgtgggtggatcacctgaggtctggagtccaagaccagcctggccaacatgttgaaaccccgtctctactaaaatcacaaaaaattagccaggcgtggtggcgggcacctgtaatcccagctactcgggaggctgaggcaggagaatcacttgaacccgggaggaggaggttgcagtgagtcgaaatcgcgccattgcactccagcttgggtgacaagagagaaactccgtctcaaaaaaaaaattgcaaaaaatctcataatattttattttatttatgtatttattgagaccgtttcactcttgtcacccaggctggagtgcaatggcacgatctcggctcactgcaacctccacctcccgggttcaagtgattctcctgcctcagcctcccgagtagctgggattacaggcacccactaccacgcccggccaattttgtatttttagtaga[143 bp omitted]atttgtgttggactgcttcaaagccatcctaggccgcaggttggacaagcttgctttatacctcatagttagagaaggtaatatttagcaagcagagttgttaaagaggaaggccttggctactcaggttatatgacagataggattcatttaggtcaatgcaaggatccaggggagagaacctctgtttacttcatttgtctccccatctcaaaaggactaatatccttgtaaataggagtgtgcagagctgtttgagaacactgctcgtcacttccaaaccccacaggctgaatgatgattgccctcctgatctctaagaaatggagtatgttagggcttaggcctggggccctttatcttctctgtcttcatctcttcttaggtgatctcacccagtaccatgctgtcaataagctgatgactcccaaatctatatatccagccctggttcctctctgggctccactcaacatctcctccccaaccttcctcctctcaatgaaaagcactcaaatgcccagttgctaagaccaaaaacatggtatgtctcactttccctcacctcccacatctaatccatcagcagttcctgtcagttttacatctaaaatactgtgtacctgaatttgaccactcctcatcattcccactcctaccaccatatatttcaggtcatcttccccttcctggactgttgcaatggtctcttccccccgtctctgcttccattcccatcccccaacaatatattctgcacagaactgtgagagatgatcatacgaaataatataaggtttgagatgtacttcaaaagaatttgagaaatagggggctagatgggtatagagatgaaaagattatccatacaatgataattattgaagctgactgaaaagggtacatggggttcatgatactattttctctactgtgtttgtttgaaattttccataataaaaaaagttgaaggaaaaaaggctggtcatgtcactctctgccttaaaacttttccactgaataaaatccaaaccgttttttttcttcttcttttttgagacagtctcactctgtcacccaggctggagtgcagtgacccaattatagctcactgcagcctcaaattcctgggctcaagcaatcctcctgcctcagcctcctgagtgctgggactacaggcgtgtgccaccatgcctggctaattcttttaaatgtttatcagagatgaggtctcactatgttgcccaggttggtctccaattcctgagctcaagcaatcctcccaccttggcctcccaaagtgctgtaattacaggtgtgagccaccgcacccggcctatacttgttttatttattttttctttcttcttcctctcctcccctctcctcccttcccctcccctcccctcttttccttttctttcttccattctctttctttctctccttctttccctccctccctcccttctttctttttagagacagggacttgctttgttgcccaggctggagtgcagtgctgtaatcatagctcactgcagactcaaactcttgggctcaagcaatcctcccaccttggcctcccaaagtcctggggttataagcatgagccaccacacttagcatagtgttttgtttttgttttttgagatggtgtttcactcttgtcgcccaggctggagtgcaatggcacagtctcggctcactgcaccctctgcctcccatgttcaagtgattctcctgcctcagcctcctgagtagcagggattataggcacccgccaccacactcggctaatttttgtatttttagtagagacgaggtttcaccatgttggccaggctggtcttgaacccctgacctaaggtaatccgcccgccttggcctcccaaagtgctcggattacaggtgtgagccaccacgcctgaccttgtttttttgttttttgagacggagtttcactcttgttgcccgggctggagtgcaatggctcggtctcagctcaccacaacctctgcctcctgggttcaagcgattctcctgcctcagcctcccgagtagctgggattacaggcatgcgccaccacacttggctaattttgtatttttagtagagatggggtttctccatgttggtcaggctggtctcaaactcccaacctcaggtgatctgcccacctcagccttccaaagtgctgagattatggcatgagccattgggcccggcctttttttttgagacggagtctcgctttgtcactcaggctggagtgcagtggtgtgatctcggctcattgcaaggtccgcctcctgggttcacgccattctcctgcctcagcctcccgagtagctgggactacaggcgcccgccaccacacccggctaatttttttgtatttttagtagacacgagttt[131 bp omitted]agtcttgttctgtcgcccaggctggagtgcagtggcacaatcttggctcactgcaacccctgcctcctgggttcaagcaattctcatgcctcagcctcccaagtagctgggattacaggcgagcaccaccatgcctggctaatttttgtatttctagtagagatggggtttt[132 bp omitted]cattagctgaaattgtatttgtttgcacattctgtgttcccctctctagaatgtaagctctacaagagcaggacccctatcctgctagttgctgaatccccagtgcctaatacagtccctggaacattgtagtgttcaaactatttgttgaataaattaatgaatcatcaatcccctgagaccaggcattgcatttcccgttctttatttcctaatcctcttagggaaggacccaggcatgcaatatcccctccatcccatccccatgctccccacccagtgggaggactcacttggcaaaggggatgaggttgactccatcatcctgcacctgcatgactggacggggctgggtagttagtctcctttttggtgctgggaggataatggaaaagaagtcattcattcgggctggatgtggtggctcacgcctgtaatcccagtacttttggaggccaaggcgggcggatcatgaggtcaggagttcaagaccagcctggccaatatagtgaaaccccatctctgctaaaaatacaaacattagtcgggtgtggtggcgcgcgcctatagtcccagctacccagaaagctgaggcagaagaatcgcttgaacctgggaggcggaggt[136 bp omitted]agaatggaaaaagaatgtatggatgctgaaaaaagagagagcttaaaaggtatttgtagcggctgggcgcagtggcttatgcctgtaatcccagccctttgggaggccgaggcaggcagatcacctgaggttgggagttcgagaccagtctgaccaacatggagaaaccccgtctctactaaaaatacaaaattagctgggcatggtggcgcatgcctgtaatcccagctactccggaggctgaggcagaagaatcacttgaaccagggagtaggaagttgcagtgagctgaaattgcaccactgcactccagactggcaacagagcaagactctgtctcaaaaaaaaaaaaaaggtatttgtagtgctggactgttaattgaacatttaggttgaagatagtgagcacaggaaaagtggatgtggtaaaaagataaaggagaaagcaaatcttctgaagctaaatgtgcagaataagtgaaatttacagatggcagttaagcgacaactggcaatatgggacaatgaaattgaaaaatgatgacagtggagactgggtggggtggaggcatttgggggtaagagaagtgacagaattgagggttctcaatgaatcaactatgagtggttagtgaaagttaattgtgtgggccgggtgcagtggctcacacctgtaatcccagcactttgcggggctggggcaagagaattgcctgagctcaggagttggagaccagcctgggc[137 bp omitted]catggagaaaccctgtctctactaaaaaatacaaaaattagccgggcatggtggcacatgcctgtaatcccagctactcaggaggctgaggcaggagaattgcttgaaccagggaggcagaggttgcggtgagttgagatcgcgccattgcactccagtctgtgcaacaagagtgaaactctgtctctaacaaaataaaaaaagaaattaaaaaaagttaagtgtggacataatggtcaactggtgacagggaaggagggggcagttgggaatgcctgtggatagggaggtcagttgcatatagggacagccaaagatgacctgaaggccagttggggtggggagaaagggcagttaaggctgggcacactggctcacgcctgtaatcccagcaatttgggaggcggaagtgggtggattgctcgagcccaggagtttgagaccagcctgggcaacatggcgaaaccccctctttaccaaaatacgaaaaagtttagccaggtgtggtggtgtgcgcttgtacccggaaggctgaggtgggagtgtcatctgagcccgggaggtcaaggctgcagtgaggtaagatcgcaccactgcactgcactccagcctaggcgtcagagtgagaccctgtttctaagaagaaaaaaaaaaaagccaggcgcggtggctcaagactgtaatcccagcactttgggaggctgaggtgggcggatcacttgaggtcaggagttcgagaccagcctggccaacacagcgaaacccagtctctactaaaaatacaaaaattagccgggtgtggtggcaggcatctgtaatcccagctattcgggaggctgaggcaggagaatcgcttgaacccaggaggcggaggttgccgtgagccgaggtcagcctgggcaacagagcaagactccgtctcaaaaaaaaaaaaaaaaaaaaaaaaagaatactagataagttaggagagagtgcacataggctcccgaaggacagaagcagccagctggaactgtagaggtgaactagtatttatccaagggaactagggatgggctgggaaagcaggtgaggtcaaaagcggagagaagtataccgtgcggaagcggcagatggggctagttggagttgggctgaaagggcctaaagtggggtctaaaggggatgtcctgactcggaggggggtcagcagaacgcgagggagcagcgggagctgcggggcattcgggcctcagatagttgggtccaagcgggtgacctagatccaagggcaggatggagctgaaggaagccaggaaggatcctccacagttgacttcggggtagccacggcctgcgcctgcgagggtggatgaggacccgagggtccggctggggctgaggggctgcctggagccccgctggagggaagcgccgggccggagggcgcggcctgcgcctgaaagggcgacggggaccctcgacaggtggaccgggcgtggccggaccttccgggcagccccgcccgagggcacgactgggggctgcttccctcgagaggggccctgaggtggtgggcccaggctgaagggcaggctggggcctgagggacgccccgggtctgagagggcagctccggccttaggcggcacccgggcctgaaggggttgtttgggcctcaggcggcgtccagggcggccgaacttgagggccaggcggggacagagcgcccgagtagccgcgccacggccggccgcatttggccccagcacctgaagcagctgcgcggcgaattctagaactcggcggggcggggaggagagagacggcgattcgagccgcgggaggagccggcgggcggtgctcgtctgagggcggggcctgagcggagccaccttctgggcgggcctcggcaggaggctccgccccctggacgcgcctccaacggcggcgacgggaactgggccggggcctgggtgcccccgcgggtcagcccccgacgtttccctgttcttcaggcgtctgcaaccctcctgggttgcggcgtctgctcgcccttctgcgtccgcagctcggtccccacgttcccgctcgctgggccccacaggccaggagcgttgcccctttaacaagagtagcccgggtcgctcccggctccttcccgggaccgcgcgtacccgcccctccgcgcgcgctcgcgcgtcccccgcccctcgctcccgccccagctcgcgctgcccgggcgggcgccggccgctggcgccgctactgctgccgcccccggggcgcgagtccgccgcccgccgcccgggcacccggcgaggggcgggggcagctccgaaccggccccagatccttcccgcttccgcctcacgcttcccggaaagcttgtccctctccgccgagctgctccgggagccccgccgcgccgaggtgagggctggggaagggggagggaagggacgcccgcggaggaatgtgccgggttggggggcggggagccggggtccggcggcgcgatctaggctcaagagtcgggatcatgtgctgtttgttccgcggaggcgcagagaggtgccaggcccgggcggccgccggctggctggacaggaggacgggtccgcatggccgccctgagaggccgggcggggacctgtgtgagaaccgccgggtgggcaaggtgcaggtggcccaagaccccctttcgggccggtcggccccaccccagccgcccagtatcctccttgtaccccacggctccttcacagctgcaccggccgacccctgtccctacctctattcccttaccccgctggcccccagccgtgccaccccatccctgtcccattagctgcagcaacggcgtcaccatcgcttgtccccaccagtgtccttccctcccctggtcagggtctagggggtcagggctgttcttcctgagccagcttctgtgattccagctactcccttcctgtcctgggacagaccagcccctcaccctcccatgctctgcccaggaagactggtgaggggaggcccagcgtgacaggagtttggggtccactggggccacaggagggggctccgcatcccttatccttcgtggtcctcctccctgttgtccgtgggcgtgggctgctcagcctctcctcccagggtgtgggcacccgatcacccacattcctgggctccagcctggcaccttccccagggcagtggacgccatagcactagccccaggttggggctggcaccagccagccggcttccttttctttctcccttttagggaggccccagggaccctctaccctcaaacacaggtatttctgggcgccccaagggtggagccctgagggttggtctgatggctacaggatgaccccaccctcccctgctcattgtcccggatcctgaggaggaagtgctgggggctgggcaaggggcttagagcccacacagctggccctgtggatcccagtcctgggccctacctacagtccttggactttgcccatctgcactactggcctggtgcatggaggttgtgggcctcaggtggaaactagattctcccttgccgacactgtgggggaatttgaggacaggttttgcatttgcagtttcctctctggtctctcttctgggctcccagtttgtgctttggcgccggagttccccaccctgtctctttaacaccgtgtgtttgctgtgctgtgtctcttcctcctttcctctcccattctttccttcatagcatgacctcaggcttgccttttgtcttatttctctaattttcttggtgtctgtgactctctgcccctcctctctctcttcccacccccctcacgtctctgcccatgtgcccctctctctgaattgccctctgtccagcctctttctctctctgtcctctatctgaacgttcagtacatttgcgagtgacaaggaataaaaatatcaccgtccctgcccttggattcacattgcattcagccactctagaggggcagctgtccgtacttttcctgctattccccccgtaaccttggccctccaacctgggaaccccagacgggtctctggaaccacaggtgccttctaacaactcttcccccgcaatcagggtatctcccagagccccagctggtgtggccaggccccaggagtaggatggggctccccctacgagggccggtggcagccagaactgatacagcccccctggtctggggccaggacgccaggtaactgggggagaccgcccaggttcctgcaagctggaatatggctggggagagaggcagaaatacctttgggagtctctcaagacagtgacatttgggaggaaagccaagggaataagagctgggtccttgagaggctgggtggctctgggggagatgtgaagagactggttccgggaagaagctgggaggcaatgtctgggtccctgcagtggttctgaccccaccactcctttctctgtcctccagctgaggagggcaggagtgtctggagctatggctggtgcctcggtgaaagtggcagtgagggttcggccctttaacgcccgtgagaccagccaggatgccaagtgtgtggtcagcatgcagggcaacaccacctgtgagtgagtccccggggcctggctgggcacaggcagggaaggccgggcccaccacacaggccagtcccgctgggccaaactaagaggagggtaatgctgggcacagagcaggtgctagtcgtaagggcgggggctggggcaggctggcctttcccgtgttcccagtccctgggagggggaatgttggcctggagccctccattgcccaatccagggaggcagctcagtgggggcgggtcctaggaagccaaaattagctttggtggctggagggggtggggaatgttaaaggggagagaagagtcaggacagtggtgaggagtgggatgcttggattccaggggctggttggggtatgggcagggactgggaatacctgaccttgactttccttcctttaccctctcctgcccctcagccatcatcaatcctaaacagagcaaggatgcccccaaaagcttcacctttgactactcctactggtcacacacttcggtgggttgttgggctgggggaagagcaaggcagtgagagacagaggatttaggtcctggggaggggacatgttaagaaataggacccccaggggattagtcagggtgaattgggaggatgatcctgggtgggggtggtaggacccttaggctgtgattgaggcctcgacaggaaggcggaatcccttggggtaattaggactagcaggggctggataggatccttggggtggtaaggacaatgatgagggtgggagggcacacaggacatttggggaatcgtcagtgatggaagcaagactcttgggacagagacacaaaggataaagacatccagggttactctgtttttctctgcccccactttctcctagacggaggacccccagtttgcatctcagcagcaagtgtatcgggacattggagaagagatgctgctccacgcctttgaaggctacaacgtgtgcatctttgcctatgggcagaccggggctgggaaatcctataccatgatggggcgacaggagccagggcagcagggcatcgtgccccaggtacgcctaggacctggtggggcagccagggcaggagcatctttagctgccctctgaggaaggaaggactagggtcggaggattatggaacagagacctggctctgaggccattggtgatgggagatagaggttgactgcaagctggacaaccctctggggtgggagggtcttcgcccctatcagaggcaacgagcctcagtgagtagagcagggctttggcatcagtgagccttgggttcgagcgccagttttacgacttactactgttttacttggtttcataataatttgtgagtatagttctcctgcaggcttgtgtaccaccagcagagtgttaactgtagaaacgccaattgggataacggagttaaccataattgtccctggctgtccagcatagcaacctggcacacgggcttgggagtcagaactcctggggtttgcaccctggctggctgaacggtagcctgtgatcttgggcaagtggggacctctctgaggttgttttcccatctgtgaaatgggaataacccctccctcaaggctgtagcaagggttaaatggggtcacttgggactgggcctggcctgtggctggacactttaggtgtgccctgaacaggagcttctctgtatttccctgtgtccccctccagctctgtgaggacctcttctctcgcgttagtgagaaccagagtgctcagctatcctactctgtggaggtaagcccgggtcttggtggcagggctgagaggggtccagactgctgagggctgtcgctggaatcagacagcctgggatctaatcctggctctgctggttactgactgtgactttggggcagtgattctgtccttcagcttcgtatgttcatctgggagacgctgttgatcggacacacctcctggcttgttgggcaggtcgctgagctagcatctgcagaatgcttcgcactgtgtattagctgcagtcacctggatcgtgtccagtggagtcagattaagttgcgttgtcattgtttttgctagttttgttacttctcatttgcttctcccactcaggtgagctatatggagatctactgtgagcgggtacgagacctcttgaaccccaagagtcggggttctctgcgggtccgggagcaccccatcctgggcccgtacgtgcaggacctgtccaaattggctgtgacctcctacgcagacattgctgacctcatggactgtggaaataaagcacggtgaggcaggctgatggagcagagggcaagggggccagggttgggaaggtgagaggcaggatccagtgactgctttctttaccctaaggactgtggctgccaccaacatgaatgagaccagcagccgttcccatgccgtctttaccatcgtcttcacacagcgctgccatgaccagctcacggggctggactcggagaaggtgggatcgcccccccccccactcccccaccggatgcaacctcccctggcaacagggacagtgacatggtagaagggtcttgggccctccctgcccatgctgggttgagtgcctcctcaggactaccatgaccgcgccccacccctaccctgtttttccgtcagatcagtctgtccccctctactgtttgcttgtcttttttttttttttttaagacagagtcttgctctgttacccaggttggagtacagtggtgcagtggtgcgatgtcagctcactgtaacctccacctcccgggttcaagtgattctcctgcctcagcctcccgagtacctgggattacaggcatgcgccaccaggcccagctaatttttttgtatttttagtagagacgaggtttcgccatgttggccaggctggtcttgaactcctgacctcaggtgatccagccgcctcagcctcccaaagtgctgggattacagatgtgagccaccacacccggctgttcttacgagacccaggacagggcttggatcccctgtgtgtcccttgtccatgcctgcggtgggcctgtagctatttgtaattgagtgagtaaccaccgtctcactgttgtcacgtattctgtttcccccggcctcctccctcgcctcctcctggctctctctagcccttgccagctgcccacattcctgctgggtgcttccctgatttccctgccccgtcccccacccgcaccttatctcctgcctgtttcctctgaccccaggtcagtaagatcagtttggtggaccttgctgggagtgagcgagccgactcctcaggggcccggggcatgcgcctgaaggtgaggggccttcagagggtggtttgttgtggggcagtgttgtgggctgtatgtggaggtctccagtcggaacctgagactctcactggggaggtaggaagcggaagtggatcacattgggagaagagggtctcatccccacattcctcatccttttccaggaaggagccaacatcaataagtccctgactacactagggaaagtgatctcggcccttgcagatatggtgagacctgggtgttggaaagaaggggcttgggaaaggggagtgacccaccctaacctccttcctccttttatcccccagcaatcaaagaagcgaaagtcggattttatcccctacagggactctgtgctcacctggctgctcaaggaaaatttgggtgagggcctcttcctctttctctgccgaccctgacacatcccacaaactcttttgatacatctgacaaatccccttgctatgccgagaatcccaaatcccgttgtcttacttctccccctgacccttcaaagggaacatcctttgaagatttcctgatgctgagaacaaggccataccctcccgtcaagccaagggcctcactgacctggctactcatgacccctccctgatccctgatctcacacccactgctgcactgctgacttcatcccccttccatggttctgtgactgtcctgcagatatatctccctgacctcatcccctcccataaccagatgtcatggttagctccaccccgctagactcccctacctcagaccatgaccctgtaagacctctgcctgggcagtgggccccagccctgtgacccggtctgactttgcttagcccctccctcagctgaagcttttccatgcactccattcacaggggggaactcacgcacagccatgattgcagccctgagccctgctgacatcaattacgaggagactctcagcaccctcaggtgaggcttttggctctagcagggatggggcagcataggaagagtgccaggagttcagaggcgagttgctcaggaccctgctcgtgagacgggggagatgccggagccttgccacaatatcttgagacctgggagagggggaaggagaaacagcagaccaagggtcccctgcccccaggcctcaccgaccctgctcctctgtcacccaggtatgctgaccgcaccaagcaaatccgctgcaatgccatcatcaacgaggaccctaatgcccggctgattagagagctgcaggaggaagtagcccggctgcgggaactgctgatggctcagggactgtcagcctctgctctggaaggtcgaggttccagggaggggcagctcagggatgccccttggcccaccccatccctcctcacttgcctttgcccagtcctggagccagggagggaccacacactatgaaacctttcatgtgctcagtgacgtggacacagatgtggagagggaacgtatgtcttcagatgttacagagctgggagggactaattctctaggagaggatgaggatccagaaggacctgtcaggctcctggaagtaatgaaatgactgttacaggaaaaaatggcaatatatgcttacaggtcaaacagtaaattgttaagaggctaggctactgggtgactttcttgacagaagttcttgcaaaacgtcagagttgaagtggaccatagcctaacagatctcagtggagtgctttctggtatgtcatgctcagcctcactgatggaaatagtgtccaaatcagaggatgtgtaatccatgttgacggtcaggaatggaccctgcattcagtcttgagatcatcccattgaggatagttagggtgctgaagggcacagtgtggggagtatgagtgttcttggaaagagaaggataaggtagctagtgatgtttgccttccaacatttgagggattttcttgcagaagagaaagcagtaaggactttttatcccagagggcagaactagaaacactagcacacatgacgtgggaccagtttcagctcagcacagctaagaattctttttttttttttttgagatggagtcttgctctgtcgctaggctggagtgcagtggctccatcttggctcactgcaacctccgccttctgggttcaagagattctcctgcctcagcctcccgaataactgggattacaggcgcccaccaccacacctggctaatttttgtatttttagtagagacgggggttttagcctggcacagtggctcacgcctgtaatcccagcatttggggaggcca[134 bp omitted]gaggcaggagaatcacttgaacccaggaggtggaggttgcggtgagccaagatggagccattgcactccagcctagcgacagagcaagactccgtctcagaaaaaaaagttcgacacagaggtttctagactggccaggctggtcttgaactcctgacctaaggtgatgctcccaccttggcctcccaaagtgctgggattataggtatgagccactgtgtccggcccagctaagaattttctctttttgagacagtcacgctctgtcacccaggctggagtgcaatggcgtggtctcggctcactgcaacctctacctcctgggttcaagtgattctcctgcctcagcctcccaagtagctaggattacaggtgcctgccaccacaccaggctaatttttgtattttagtagagacggggtttcaccatgttggccaggctggtctcgaactcctgacctcaggtgatccacccgcctgggcctcccaaagtgctgggattacaggtgtgagtcaccacacctagccccacctaagaattttctgatggtgcaaatcatctaatagtggaaaggactggccgcctccttcagtaatgagctctccacccctggagttcaagtagagagactgggtgcccatttaccatggctgcagtaggagggctccttgcctggtaggaggctgaccagcagtcttctgtagtccttacagactggtcctctgtgaagctcttggtctcctggatgtctctcatcagctccttctttccttagcctcattctttttcctctttctccctcccaggcctgaagacggaagaagggagtgtcagaggcgccctgccagctgtgtcatctcccccagctccagtttcaccctcatcacccaccacacataatggggagctggagccgtcattctcccccaacacggagtcccagattgggcctgaggaagccatggagaggctgcaggtgggaagctggagctggcaagggctgggggtctgggcattcctgggagtttacttctccaaagtcaagcttgagaaagaaggaattctaggagtagcatggccccagggtaggttgtccctaccctgggtctgcttgtcccagaccatcctgaaacctacccaccttacgcccccaggagacagagaagattatagctgagctgaacgagacatgggaggagaagctacgcaagacagaagccctgaggatggagaggtgtgagggccgacagttggggtcctgggtggagttggaggccatgggggaggtcaggccccacagggaaggaggtcacgggcagtgaaggtaagactgacatttgcctctcctctgcccacagagaagcattgctggctgagatgggggtggccgtccgggaggatgggggaactgtgggcgtcttctctccaaagaaggtgagtgaggaatcgagcgaggaggcctagagagctctctggatgcctagaaaagaggcagcaggtgcagggtagtgagtgctgtccctgatcgctccctttgaggtccccggcttgtccctccatcatttctgtcccctcccctgccacctcctctccgtcttgtttagtcatccctgccttctcccttcagccattcaacagtcagcctcaggagagggagaggacctgggaaatcggaggttggttgcaatagagcatgcttttgtatcatttgagttttgtattctgtgcatgctcaaaaagataactaaagaaatctatttttcagaaggataacttgggaagacaagactaaagggaatagaggaggcatgagcactacattgtaagacagtggttgccagtgcagcgaggggttggttatagatggaggcacccgtgtagcttggagctatgctgcaactggtttcctggagaaggtggtttggaaagtggaacctgaaagatggacaggacttgggaagtatggaggagtagggccaacatgaggttgaagagcctggggtacatgttggggtgagtgggacacgccagtgcctgacacgtgcctgccgccaggttttaggtacctaataaatctttgctgaaaggaaggaaggagcagggcgggagaggtcaggctcaggtggaggcaggaatgatactccaaatattaataaccatccggcatagggactgaccagtcagaaaggacactggatatagacagccagcaccgctgtaccggtgcataccagtgaagggatggtgcagaggccagtataccagtgaagggatggtgcagaggccagtttgagcagagcatgaacttccagttccaccagggaaccagcccagcccgtctggaccatggtgtgaagcagcagaggatcaggccctaagtcagatacactgtgctctgagccagacagtgtcactgggggctgcctggaagaggtgatgggttaccagaagaaggctcctctctgttttgtaaagtcaggtccatctgggggactaagcaagcagggatcactgaacccctgttctgaaaagaggagaggggttttgccttgcctggcccaagccacattgagggagtgaaagagctgtgggcggtaggccaggctgcgtgtctggggtcttgtctggggctgggtaccctggggctttggggtccttctgagggatccagactcttctgggacccagccacacctaggtggaaagaggggctacggatgcgctcagcatggcttccagccacctttgtatacctggagctgggccgcttccaccacggttgcaaggatggaggaaaagcagaaaggactggggagactggtggggtggaggtttcttccttggagagcttgcagagatgccacctgccaaagcctggggaccaaaggagggggttcttgttttaattgttcttataaaggtaatacacaccagagagaacattctaatagttctaaaaggtgtgtacagtgaaaagtctccaatttacagcattttgttatagaaaaaaaaaaaaagtaactctccatccttcccacccttaagtttcccctcagaggcagccttcattatgagttctttttttttttgagacggggtcttgtactgtcacccgggctggagtgcaacggtgcaatcttggctgactgcaacctccgcctcctgggttcatacgattcttctgcctcagcctcccaagtagctgggattacaggcgcacaccatcacacccggctaatattttgtatttttagtagagatggggttcactatgttggccggagtggtcttgaacttctgacctcgtgatccacccacttcggagtcccaaagtgctggggttacaggtgtgagccaccgtgccaggcccattatgggttcttactatattctccttgggtcgggcctggtggctcacacctgtaatcctagcactttgggaggccaaggcgggtggatcacgaggtcaggagattgagaccatcctggctaacacagtgaaaccccgtctctactacaaatacaaaaaattagccacgtgtgctggcgggcgcctgtagtcccagctactagggaggctgaggcagtagaatgacatgaacccgggaggcagaggttgcagtgagctgagatcgcaccactgcactccagcctgggtgacagacaagactctgtctcaaaaaaaaaaaaaagaaaaaatgttctcctagagatgctgtctaggagatgttataacacatgtacaggcatatgttatatagaactatacacatttactcacattcacggcctctctaatagttgtagttgcatatctattttatttatttattttgagacaagagtcacactctgtcgcccaggctggagtgcagtggcacaatctcagctcagtgcaaactctgcctcccaggttcaagtgattctcatgcctcagcctcccaagtagctgggattacaggcacccaccaccacgccgggctaatttttgtattttagtagagacagggtttcgccatgttggccaggctggtctcaaactcctggcctcaaatgatgcactggccttggcctcctgaagtgctggtattacaggtgtgagctactgtgcttggcctgcataccttattttaaagcttcctttatttttttcacggtgtcagggtattctattgtgtagatgtaggataatgtatttaaccagcttcccactgatggacattcagattgtttcccattccttgatactacaaaaaaaggctacaatgcatagtcttacaaatgggtgttatctgtagagcagattcctagaa[190 bp omitted]tggcgggcacctgtagtcccagctacttgggaggctgaggcaggagaatggcgtgaacccgggaggcggagcttgcagtgagccgagatcatgccactgcactccagcccaggtgacagagcgagactccgtctcaaaaaaaaaaattttttttttaatctatattgccaaagtgccctctgaagattataaccataccaatttattttacttttttgagatggagtcttgctgtgttgcccaggctggagtgcagtggtgcaatctcggcccactgcaagctccgcctcccgggttcacgccattctcctgcctcagcctcccaagtagctgggactacaggcgcccaccaccactcctggctaattttttgaaccataccaatttatactcccaagggtaacatacaagagagcccatttcccctcgccctttcccacattctggcttagtaagacttttctctttgcctgtgtgattggtgagaaggtgtcttaaggtagttcacttttacatttttctcaaggtggtgaggatgaactcttctcatgtttaaaagccatgtggtctaaagccagaagagagaactgttagactcatggggaaatgggtttggtgtgagtagctccaacagggaatagttgggtcttagaggaaaaaactacagtttgtcttggagggagcctcctcttgctaagacccccaccaccagggctaaggattgcttaaatcagtggtgttcaaacctggttctgagctgccttctcaggggctgaggatagggacaggaccagaccctggggctctcacccccagcctgggcctgagcagcttcttgcttatctgcttgatgtcctaggcttctagagaaggtttcattttgaacaaagagttatagggctgaagaaaaagttgaaaagcaccgcctcaaatcgtgttccctctccccagggatagattgctttctgcttccggagcccatcagcgtttgccagtcccagagcaggcctgacactgcagtgtagggaggggcatgggagtccctcaggagaagtgtcgcaggagtgatccttggagcacttgggtgaagggcggatgcacaagatacacagacacctctgggggacacagctttgggctctgagtgttaagtggctcccagagaaatagaggttcgactccgtgctgtttcccttctgtaccctgtgctttctgcctccatgcttctgtccaggctgctttcacccggagcgctcttgtgcatgtccacgccctccttgtcctcaaaggctggctcccatgttacccttccattaagtcctcctgatccccttgaaatcccatagttcttcactttgttcctctttgcatgtgagtccctcccagaacacagtggcactcaaccccctgggaacaaatgaatgaataaacgaacttaaacaagggcatgagacaatcagaaactcctccatgaggcatccgtttcccacttgtaatggtgtttccacgccaagcctcacctcccctagctgactctcatttcctgactgactggacagcagtgcctgggcttgactcatctctgtaccccgcctagcgcttcaccagggtgaggtagaaaggccacagtcagtccttctgcagcagaggcaggggtcttgtgttctgatggaaggcttaggaaaacttcccggaggaagttgcatttcagacagactgggaggaacgtgaaggaagtgaatgattttggcaggtgggggcggggcgggaggcggtctgttgttggggacattggcagtcagggatgcaggaggcctactttggagggagtgctcaggggtccgctgagtggaagtacagagtctgggagagagcctgggaggggggcttggacagatggactggagccgggacatggaggaggcccagggatgccaggggaaaaagtaggctcaagtccagcgggcctggggttccagctggagaggtctcagcagagaggcaaagacatggccatagcgaggtgtgggcaggaagctgggagacctaaggggtggcaggaaggcaggtgggcctggtgcagggtggtgccgagggatggagaggtgtgtggcacggcagcagctggcaggaagggagacttccccaggcgtggcagcagtggcatgaatgggggtacagaggcagcgtcgcctgtacgccatccagagtactgcccagcaagggcagggctgttataatggaaacaagtcaggagaaggtgctgtgggagaagggaatgggccgggttttcagcacagagcagcgtaacaatcactcaggtgttcaggatggacttggctgggggccttaggcagggacagccccaggcgggtgctgcagggacccaggcttgaggtgaagcagcccagggaggggtagtcactggggaagagtcaatgagtctgcttcgagaaacatgtttgttccatttgcttttaagttgaagtgacactttttatttttaaattgtgaaagtaattcatgtgtgtaggaaattcaaggttgatgaaaggtggggagtaccagtctgctcactcagtctcccccaactctccagaagctgcaaggtacattttgaggaaagaaatgatgggacctgagacagaggaatatagggaagaagagaatgcagggggtccggggcttctggtgagggagcctggtgggtcgaggtgcttctgaagagacaggccttgggaagggttgctgacctggatgcagctggatgggtggggcaatttttgtcggccccttgtgtgaggagagggtggatcaggctgtcctgaaggcggttggtgtgagaggtgggaaccaaagaacgtcatcggggtggagggatgacgatgggaggagtacagagggcaggagagctctccagagtgagggggcgcagctggcagtgccaggactggaggggtgtctcctcccaccgctccctttcttcctttctatagcacccctggctggctccccctgaccacctttctctccccgcttagactccccacctggtgaacctgaacgaagaccctctgatgtctgagtgtctgctctaccacatcaaagatggcgtcaccaggtagcgtgtacccagcggcctggggggcagcctctgcttttggggtgtggctgccaagggttgtccacattggtgtctcccttccctggtggtccctggagatacctcagatctctaaacagctgcctccacagccctgcacgctctcccagcttcaagagaagcgtgcctgctcagtggctgtcttgcctccacctgccagtttggttagggcgagacaaccttgtttactggggcaggagagttgggaaacatagaccccctcattcttagaccctgatgccattgccttggcctcccttggtggggccttccctgggggcgggagaagggaaacacggcctggtctgtgcggttgagggctgggcagctaagggcatgtggctccttgggctggtattatgaagtcatgggggctcggtgcctcccctaaaggggtgagggtgcccttcccctcccaccacaggcattcgtggctgtccttggtagtcatcttgggtagggagtgagctctcaggatcatcaacctaaggatgggtggaggcctgtggctgagggtgcccgtttctcccaggtttgcttgtacccaggtagcatgtacccagtggcccggggggcagcctctgcttttggggtatggctgctgagggttagccacattggtgcctcccttccctggtggtccctggagataactcagatctctaaacagctgcctccacagccctgcatgctctcccagcttcaagagaagttggcgagcctgctgtataacatggtgactaagagcatggcttcagagtcaggcagacctgggctcagatcccagcatcacttcactgcccactgaatgaacccgggcaagccatttcacctccctgagcctctgcttcctcatctgtgaaatgggaataattggcttggttcattgagttggataaactggtgttcaggaggggcttggttaaagtctggcacatgctcacaaacgttggccattgcttccccagggtcggccaagtagatatggacatcaagctgaccggacagttcattcgggagcaacactgtctgttccggagcatcccccagccagatggagaaggtaatggctgagggggtgagagaggccagacagggagagaggccccatgttccaccccacacactgaactcagaggtctgggttgggcaccagggagtgcagccatataaagaggggatgtggccttgtcctcagaggggcttggggctcatgggtatgaatggaggaataccacaggcccagccctctgcacccaccctgagaagacagactactgtgtggtcaggcactggcgagggttctaaggtagaaatgggacactagtgagccagagtgtgggattttgctgaagagaagatcctgcccttcttgatcttgttcaccacaactagcactctgatcctttttaaacaaaaacctgtatttgaatatcggaacttgtccctgtggaaaacctgcctctatccagctatgactgccgagatttctttttctttttctttttctttttcttttttttttgagacggagtgttcgctcttgtcgcccaggctggagtgc[132 bp omitted]cggggtttctcccatgttggtcaggctggtctcgaactcctgacctcaggtgatccgcctgcctcggccttccgaagtgctgggattacaggcgtgagccactgcccccagcttttttttttttttttttttttttttatcatttgagacggagtctcactgtttcccccaggctggagtgcagtggcatgatcttggctcactgcagcccccacctcccaggttcaagtgattctcttgcc[134 bp omitted]tggcctcccaaagcactgggattacaggcgtgagccactgcacctgctgaggtgtatttttgaggccaccagtttgttttagttctaacacttaaaaaaaaatagaatgatttgggttcacataagctcaagcaaagtctctgtgaaaatgagttgggcagggaggaaggacgtggtacacatgtgctgtctgtcagcttggacctggtgtgtgtgttgtgcctcagagacctaggagtgcttggcctaacaccttccaggggacaagggacctggggtgtgtatggtcagcactttttttttttttttgagatggagtctcgctgtgtcgtccaggctggagtgcagtggtgcgatctcgactcactgcaacctctgcctcccgggttcaagtaattctcctgcctcagcctcccgagtagctgggactacaggtgtgcgccaccacacccggctaattttgtatttttagtagaaacagggtttctccaactcccaacctcaggtgatcctcctgccttgacctcccaaggtgctgggattacaggcttgagccaccacacccagccctaatttttgtatttttagtagagacagggtttcaccatgttggtcaggctagtcttgaactcctgaccttgtgatccacctgcctcggcctcccaaagtgccaggattacaggcgtgagccaccgcacccggccagcacattttaaaaaataacaaaagacgctatcatgtgcgtcttacagtgaggtttaagacatacctcttggggctggtggggtggctcatgcctgtaatcttagcactttgggaggccgaggtgggtggatcacttgaggtcaggagtttgaaaccagcctggccaacatggtggaaccccgtctctactaaaagtacaaaaaaattagctgggcatggtggcgaacgcttgtaatcccagctacttaggaggctgagacaggagaattgcttgaacctgggaagtggaggtttcagtgagctgagattgcgccactgcactccagcctgggtgacagagtgagactgtttcaaaaaaaaaaaaaaaaagacatgcctcttcggtttccatatggttcagggtcagccaatcaaggcagttgttctggtctggttcaagtcctcagtgacagcaaatgcttccggcattttgggttgaaagctgttgaatcagttcagcccagtgagttattgccaagttcctgttctgcggcaacctcaagccatttgctgggggagatatgaaagccatacaggccaccaaaaatacacctcagcagagccagcccatgggcaaggagctacagtgcggagagatgacacccgtgtgcaagactgacataggtcacagtaaaggcagccaatgattctgtgttgccaagggtggggattgtgatggtttagtccctgtgggccttggttcttttttttttttttttttttttttg[310 bp omitted]taagacctggccagaaacaggcagagaggacgggggcagcacagacaggtatggatgtagaagaatggtttttactgaccatctactctgtgcgtccgcattttctcacacagctcacaggtgagagaactgaggctctcgggggttaggtgatttgcaaaagatgacacaaaatggcagaactggattcagacacaggatggcaggcaccaggggctgtgctgtgagctctgccctagactgtcagattatcatgggttcagggtaaggctgcctgggccaagctggagcagtcttctcacccagccccactttccctgcataacacgtattccctccttttttattttcattttcatttttattttttgagacagggtcttgccctgtcacccaggctagagtgcagtggcatgatcatggttcactgtagcctcaacctcccgggttaaagtgatccccccacctcagcctcctgagtagctgggactacagacctgtgccaccacacctggctaatttttgtacttttcgtacagacagggtttt[142 bp omitted]aaaatattaatagaattaaatgcctttttccccccctcttcttttagttttaataaatggcatctggccaggcacagtggctcatgcctgtgattccagcactttgggaggccaaggcgggcggatcacctgaggtcaggcgggtggatcacctgaggtcaggagttggagaccagcctgaccaacatggagaaaccccgtctctactaaaaatacaaaattagccaggtgtggtggtgcatgcctgtaatcccagctactcaggaggctgaggcaggagaattgcttgaacccaggaggagaggttgcagtgagctgagatcgcaccattgcactccagcctccaacaagagtttcactccaacaagagtgaaactccatctcaaaaaaaaaaaagaaaaaagaaaagccatccatcacgattaaatgactttagattatcttgtttattgtctgtcttaccagacagaagtaagctctatgagagcagggattttttgttttatatcaccaatgtatttctgagacctagtaaaatagtgtttggaagatagtaggagtgtggcatatgtgggtttgaatcaataaatgaattttgtggcatgatgggaaatgaagaaaaggtggggatagatggcaccccctctaggcacccgcatcccgtcctgctgtccacctctgctgctgctgtttccccgacccaccgtgatgcccttggctgcccctctccccatcggcttctgagtctccctctgctcctaagctgagtcctctgctctccttgttctcccagcagcatccgttgtccccatccctgcctgatattatagttcatcccagtttctgtgtttctctattacttccagtataagtattataataataaaacacatgtttgcatgttattttatggtttacttttttgggccttctaaccactcttcattcagacttcattatcccatcttatagaatatcacagaagttaaattgacttgttcagcatccctggctaaggagctgcagagcctgggcctttgggataccagggttcctctgcggcaatggccactgctcctcgaggacagggagctgcctcgtgcatcttcgcgtccccagaaactggcaggctcagtgatttgtactgaggagcagctagatggatgtttgggttgggttgactttctcttgtcacatgtcagctgtggcttgagaagatgagtcaggtggcagtttgcaagatgcatgaggcagaggggtgggctacaagcctgctggaggagcccaggccccaccagggataatgtcagtgggaaaggtaggaatggacatctggaaggcagaaatgacagggcctctgagcagttaaacatgaggaatgaatccttttgacaattactggttttctaagctgctgctggggaggatagaggtgggtgagtcaggagccactgcagaggcttctgggaattgtagttggggctctaaccctccttctgctcttcctttcccgtgctgcctgccaccagaggggccatggcaccccctacaggtactgggggtgggactggtggtgcatgtgtggttttttggggtaaggcaaggtgggaatctgtgaccatgacccaccttcctccagggtctaatctttccccttcctctgcccctccattcagtggtggtcactctggagccttgtgaaggagctgagacatatgtgaatgggaagcttgtgacggagccgctggtgctgaagtcaggtagaagatgtgtcgcagattgagggttctggggcgtggctgtgtgtaggaagtctcaagggaggtccttctgggtgcatcctagaggaggaccctgaaatacatcagaaatagcacggggatataaagaaggaactgggaagtgaaggtcaaggagtcaggtcttggtttctctttccgccccagggaacaggaagaggatgccaagctcttgcaattccctttggttgacaagaatggggttggtccctgggtgtcagccaggggagcataggctccaactgccttcagacttggggtgatgaaggggagggtgtcacagcccctgtgccagattctctatgccttgggtgtagggatggatttggtgctgatgggaagcgagtttacttttccctcctcccatctctagggaataggattgtgatgggcaagaaccacgttttccgcttcaaccacccggagcaggcaaggctggaacgggaacgaggggtccccccacccccaggaccgccctctgagccagtcgactggaactttgcccagaaggaactgctggagcagcaaggcatcgacataaagctggaaatggagaagaggtgcgagggggttacccacgtgccccatggccgtctaggccgtccctcccgggcctctgggcccgtgtcctcctcttgtcagatactcaccaaggttgctcttccttccctccctgtccaatcccaggctgcaggatctggagaatcagtaccggaaagaaaaggaagaagccgatcttctgctggagcagcagcgactggtgaggggcagcaggggctggggatgggctgatgggcagatgagccgcaagcctgagtccgagtgcagtgctcaccgctgagccagagtgggaaatgggcatgggggtaaggggaagggtccaagaggaaaaagccaggagagagatgtgactacaggaagaatccattgtgaggaaggaaggaagattcctccagttgaccaggccttcccatactccagtttctcgtgccaagtttatgattttcaccatatccaagtaccacctgtgttggtattaagattgttgtggtttttttttttttttttttttttggagatggagtctcctgtcacccaggctggaacgcagtgggatgatctcgacttactgtagcctccgcctcctgggttcaagcgattctcatgcctcagcctccccagtagctgggattacaggagcccgccaccatgcctggctaataattattgtatttttagtagagacagggtttcaccatgttggccaggctggtctcgaactcctgacctcaggtgatccgcctgcctcagcctcccaaaatgctgggattacaggcatgagccaccgcacccggccatggactttctattttgtttttgaggcaggatcttgctctgtcaccctggctggagtgcagtggcctgatcatagctcactgcagcctcgaactccttgggttcaagcagtccttccacctcaacctcctgagtagctgggatcacaggtgtgcacttccatgcctggctacattttttattttttgtagaggtgggggtctcactacattacccaggctggtcttcagctcctgggctcaagtgatcctcctgccttggccttccaacatgctgggattgcaggcacgagccaccacccctcaatggtcttttaagtcttgcacaaagttccacactcgattagctacaactaatacttatggtaactttctcggtgccggccatggttctaagtactccacgtggatctgggaggtagatcccgtcactatctctgttgtctagaagagcagcgttaagcagtctgcccaagggtgcgctgttggggtggagcaggacttgaacccaggctccctgatgggcgtgtttccagtgtacttaggacacactgggccaagacacatgggctctggatgtccttagccctctcttcctctttctttctctggccccagtatgcagactcggacagcggggatgactctgacaagcgctcttgtgaagagagctggaggctcatctcctccttgcgggagcagctgccgcccaccacggtccagaccattgtcaaacgctgtggtctgcccagcagtggcaagcgcagggcccctcgcagggtttatcagatcccccagcgacgcaggctgcagggcaaagacccccgctgggccaccatggctgacctgaagatgcaggcggtgaaggagatctgctacgaggtggccctggctgacttccgccacgggcgggctgagattgaggccctggccgccctcaagatgcgggagctgtgtcgcacctatggcaagccagacggccccggagacgcctggagggctgtggcccgggatgtctgggacactgtaggcgaggaggaaggaggtggagctggcagtggtggtggcagtgaggagggagcccgaggggcggaggtggaggacctccgggcccacatcgacaagctgacggggattctgcaggaggtgaagctgcagaacagcagcaaggaccgggagctgcaggccctgcgggaccgcatgctccgcatggagagggtcatccccctggcccaggtaggactggccttctgcctcccttctctcctccctcggctcttcactttaggagtctgaaccttccatctcagagcctaaccttccccaagtctggaaaaaattgcattgaagtatagtacgtttttttcaatattgtttacgaaccacatgcctcgctgtcaccaggctgctaattaaaatagattcccgggttccaccccagacctactgaatccacatctttggggacaaatctgcatttataataagctctgggtgtttctgaaatacagtgaagtctaagacccactgatataaagtttgcagttttgttttgtttctgaggtgaagtcttgctctgttgccagtctggagtgcagtggcacaatctcggctcactgcaacttccgcctcccaggttcaagccattctcctgcctcagcctcctgagtagctgggactacaggcgcgcaccaccacacccggctaattttttttttttgtattttagtagagacggggtttcaccatgttggccaggatggtcttgatctcttgaccttgtgatccgcccacctcagcttcccaaagtgctgcgattacaggcgtgagccactgcgcccggccctaaaccactatttttcgagcttccttatctctaggcttttctctggaccctttgacatccagccactccaggtccctcttgaatccacatgtcctgaggattcagctctcctcacatcccttctccttttctcactcctccctcccaggatcatgaggatgagaatgaagaaggtggtgaggtcccctgggccccgcctgaaggatcagaggcagcagaggaggcagcccccagtgaccgcatgccgtcagcccggcccccctcgccaccactgtcaagctgggagcgggtgtcacggctcatggaggaggaccctgccttccgtcgtggtcgtcttcgctggctcaagcaggagcagctacggctgcagggactgcagggctctgggggccggggcggggggctgcgcaggcccccagcccgctttgtgccccctcacgactgcaagctacgcttccccttcaagagcaacccccagcaccgggagtcttggccagggatggggagcggggaggctccaactccgctccaaccccctgaggaggtcactccccatccagccacccctgcccgccggcctccgagtccccgaaggtcccaccatccccgcaggaactccctggatggagggggccgatcccggggagcgggttctgcacagcctgaaccccagcacttccagcccaaaaagcacaactcttatccccagccaccccaaccctacccagcccagcggcccccagggccccgctaccccccatacactactcccccacgaatgagacggcagcgttctgcccctgacctcaaggagagtggggcagctgtgtgagtcccacatcctgggcagagggcctggtggggccccttgctaggagaagggaagacgcccgagacgctgcttccccagaagtgctggggcagggaggcccaggagatgagagagaaggtccgagtaggtgatagaagacaagggggagaccgagccggaggctgaggaaaggaagagggcacggagttgccaggagcaaaccaaagtgaagagagagataggaagctgcctcggggccaccccttgcaaagggggtgtgtcccacaaacgctgctatgggtggggtggggggctggggtgctgcgtagccagtgtttgactttcttttcaagtgggggaaagtgggagaggactgagagtgaggcaagttctccccagcccctgtccgtctgtctgtctgtctgtggtggtttctgtttcttgggaggcatggtaggatcataagtcattcccctccccttccaggcctcctgctatatttgggggacctgactggtttggctggagtcccatgaggatgtgggccctttaataaaggatagcaaacagggagcttgtggcctgtttgttttgggttttcatggaggtgtaggttatataaggcaatggcacaggtcttaagcatacttatcagtgaagtattgtatgtgtgctctgtgcaggcaccacccagatctggatataagaatgtttccatcttgtcttcctgaacttcaccctcctgtctcttccttcagggtgcgcagcccgatcttttccccgctttttttttttgggagacagggtcttgctttgttgcccaggctggaggtacagtcttggctcactgcagcctccgcctcctgagtagctgggattacaggcatgtgccaccacgcccggctcattactgttttttttgtagtgacgaggtttcaccatattggccaggctggtctcgaactcctgatgacctcaagtgatccgcccaccttggcctcccaaagtggtgggattacaggtgtgagccaccgcgcccggcctcccctgctttcatgtttgcttacccagtgtctcagtctgtgccagcagcaccactgtctgttatggacaaagcacagaagcggggatgcgaggggaggtagagggaccgccagcctgtcaatgcttaactggctgttgctgacagatacagaaggatttgtggggtacagaggagttctgctttaagtcacctaacttacttgaaaggtctcccaagcagccagtttctcttgatagtgaatgggttgggcaagcatactgcgcttacctgattgttttcatcctggttgtgttacctgccttctggcaggctacatcattgttcccagtcgttattttatttgtgttaagactgtttgttgg[140 bp omitted]ggcatggtggcgggggcctgtagtcccagctactcaggaggctgagg[139 bp omitted]ctggcttgaggcagcgagcccttgactatgccacattgccaggattttgcaggttagattgtactacagcactgcctttggcttgccagactctggagtccccacattttcatcctgttctcaggaaaacactttgacccacttgaagctctgagctactgcttcacagcttcctggggtcagtctccagccaaaaccatagatatcccaactgcagccaaaccacggctctgggcgaaggaacgattaggtttactctaggtttccacaccctgatgctcctgcctttactttgacacctctgactgccaggttttcacagacctgttgacagtgactcaagatctggaatgtaatggatggtttggcaacagtgtttgcttgagcagtttaaaatctggccagggagactcaatgtgagcaagaaaatgatagaataccaagttttctggaggtcagagggagctgagttgagtgttaccgagaatgctgtggggtttgagatgagaaaaatagcttgctaatttaaaagacggattatttttccctaaagaccttgacttatgtaaatgtatattatccataattttaaaaatccacttatggctgggcacagaagctcacacctgtaatcccagcactttgggaggctgaggcaggaggatcagttgagtccaggagttcgagaccagcctgggcaacatagtgaaaccctgtatctacaaaacatagaaaaactagttgggtgtggtggtgtgtacctgtagttccagctactagggaggtaggaagatcacctgagcccatggagattgaggctgtggtgagctgtgaaggcaccacagcactctggcctgggcaagagtgggactctctcaaaaaaaaaaaaaaaaaaaaatccacatatccagccttccaagtcagtctttaataatgtgcacgggccaggcacagtggctcacacccgtaatcccaacactttggaatattagggtgggagcatcacttgaggccaggaatttgagaccagcctgggcaacatagtgagactgccccccccatctctacaaaaaataaaaatcaaaaataatactgtgggcaaactttacttagattttattcagagtagtgcctgtttatttttcatctgtgctacctgtgccggcattccatatgcatttgatttagtctttaaagtaccccggtaaaataggtcttttgtctgcatttttcagatgggaagactgaggttttgtttatttatttttatttatttattttttgagacggagtctcgctctgttgcctaggctggagtgcgatggcacaatcttggctcactacaacctccgcttcctgggttcaagcgattctcctgcctcagcctcctgagtagctaggattacaggcgcccacaaccgcacccggctaattttttgtatctttagtagagacagggtttcactatgttgtccaagctggtttcgaattcctgacctcaggtgatccacccgcctctgcctcccaaaatgttgggattacaggcgtgagccaccacgcccagcctatttatttatttttttagaatcaagatcttgctatgttgcccaggctgaactcgaactcctgggctcaagcaatcctgcctcccaagccaagcagctggtactgcaagcatgtgccaccgtgcctggctcctgaagactgaggttggtttagattaatgagttgcccaaattcagacagttcttaagtggcaaagttaggattccaacccaggtcaacataactaaagcccaaaccccatctcacccctctaggccatcaagtattggctgggtgcggtggtttatgtctgtaatcccagcactttgggaggcggaggcgggaggactgtttgagctcaggagtttgagaccagcctgggcaacataacaagaccctgtctctacaaaaatatataaattagccgggtgtactggctcacacctgtagctacttgggaggctgaggtgggaggatcgcttgagcctgggaggtcaaggctgcggtgacctgtgattgcaccaccaggagaccctgtcttaaaaatgtatatataaaaataaaaagaacatcagacatcaccatcacctcgcttagaatccatggggccttctcctcaaattcaatcttcccaggcatttcatgaacttgcgtctagtttctgttccctctcaaattgcccaggctgtcctgtgagtgacagcagctatttcgtgggcctcctctggaatcatgagaagtcacccaaacaatctcagttttctagctcactccgtcttgacatttctacactgtcatccttggttttcttggaaattaatttgcttttcttcattgtctttctttggagctgctttccttttgttggttactattttatttttagcttctcacaccataccgacatatgttggttattcttttagacatgttttttgttgttgttgtcacctggaacttttgtatcttgaataaatttggggatcaaatacattttttctccaccagtcttatttatacctttctatattcagagcttcaaatttggtttggtttgaaattgttctccccccaacctttttttttttttttttgagatggagttttgctcttgtcgcccaggctagagtgcagtggcatgatctccgctcgctgcaacctccgcctcccgggttcaagcgattctccggcctcagcttcccaagtagctgggattacaggcatgtgccaccatgcccgaccaatatttgtatttttagtagagatggggttttggcatgttagccaggctggtcttgaactcctgacctcaagtgatccgcccacctcagcctcccaaagtattgggattacaggcatgagccaccatgcctggccttttttttttttttttttttttaacttttatttattttcgagaaggaatctcactctgtcgcccaggctggagtacagtggtgccatcacagcttattacagcctcaacctcccaggctcaagtgatcctcccacctcagcttcctgagcagctgagactgcaggtgcatgccaccatgcccagctaattttttgtagttttctagaggcagggttttgtcatgctgcccagggtgatctggaacttcggagctcaagcaatccatccatgtctgcctcccaaaatgctgggattataggcgtgagccagtcaccttttcccttttattttattttattaatttatttttattttatttttgagacagagccttgctctgtcgccaggctggagtgcagtggtgtaatctcggctgactgcaacctctgcctcccaggttcaagcgattcttctgcctcagcctcccgagtagctgggattacaggcgcgtgccaccatgtccggctaatttttgtatttttagtagaggcggggttttaccgtgttgaccaggatggt[131 bp omitted]ggatgccattttggttcaggtggaccgtgaataggtttcactcatcatgcccaaaggttgccactcctgacaagtcacagacaacgcttgcaccatcatcttcttccttcagagtctgtggtcccctggatgtcactaaggtcctgcttcctgtaccaataggttttaaacactacccaaggcaggctggctttaaatatcctacttaatctggctgacaggctctccctgcacctctggtactctgctgcctcattaacagctccggctactcagttaaggttggcatagtgtccatctctccaggtcaaaggccagcagcctctgccttgtacaggagtgttctcactcctgctacccacttctgtctctactgaaaggcaggaggagactgtggcatcattgggatagtacatttcatctaaaagcctggtcactagatgtgagttgtagaaactgcttctctcatccctcaacaatttcacagttgtaggagctgacattaacctgccatgcccccaacagctaggcgcggtggctcatgcctgtaatcccagaactttgggaggccaaggcaggtggatcacctgaggtaaggagttcgagaccagcctggccaacatggagaaacccccgtctctactaaaaatataaaaattaggcatagtggcacacacctgtaatcccagctactcaggaggctgaggcagaattgcttgaacccaggaggcggaggttgcagtgagctgagattgcgccactgcactccagcctgggtgacagagcaagactcagtctcaaaaaaaaaaaaaacaaaaaaaaaacaaatcctgctgtgtccccaacagcctcaccaatgagaatttccacctcaactcctcctattccttcccccacctgccctccccaccttaatctctggagaaggaatatgttttgagataactgggaaagtcttgccctgtggtacaatccattaaaggttctttacaaatgaccagggaagctgttctgtttttttgtttttgttttgttttgtgttttgtttcttaaagacaaggtcttgctctgtcacccagggtggagtgcagtggtgggtctatagttcactgaggcctcaaactcctaggctcaagggattctcctgcctcaccctccccagtagctggaactacaggtgtgcgtcaccatgcctgactctggctgtgttttgttttgttttgtttttgtagagacagtgatcttgctatgctgcccaggctggtctcaaccttatgggctcaagtgatcctcccacctcagcctcccaaagtgctaggattacctgcgtgagctatagcgccctgcctgttctgggcttcttgcagagcctcttcagctgcagagaagcagctctcctttctccaagtccagagccaacaggtgagggctgcagtcagaatctctggagcacacagacctgggctccagccgtctcactaattagctgtggtactctgggtaagtcaccttctctgagtttcaatttccttttctgcaaaacaggacgaataatgaagctgttgggaagatttactgataatacatgtaaagggtctagcacattttaggagctcaaggttggtgccttccctttttctttactctgaaccggatatgaggccttgagaaagaagagaggcgcttgcaaaacgaggtgaggtctcaggcacagtggctcacgcctgtaatcccagcactttaggagaccgaggcgggcggatcatgaggtcaggagttcgagaccagcctggccaacatggtgaaagcccgtctctactaaaaatacaaaaattagacgggcatggtggtgggcacctgtaatcccggctacttgggaggttgagggaggagaatcgcttgaacccaggaggtggaggttgcagtgagccgagactgcaccattgcactccagcctgggcaatagagcgagactccgtctcaagcaagcaagcaagcaaacaaacaaaataaaaaacgaggtcaagtttcaaaagatgtcacccccaacctggcaaaacttctcctcaagccctgtcgttccactcttgtccgccaggaggagaaaaggttccctcgaaggacgtctttgcttgcgcgttcacggagccttgagaacgagtggccgaggggacccctgcggccctgcgcgcctgtgagtctcccgggcgggcgggcggtgggggtgcgaggccggggggtgggtgcgaggcgtgggggaggtgcgaggcgggcggggcggggggcgcgaggcgggagggcgcacgcgcagaaggctggctggggtgacgcggcgccgggcttgggcttctgtattccgcgtgtctggaggaaggtccggaggtgggcgggagccctgcggggatttcctcttcccccaggactagctgtcatcttcgtttttcagaagggaggacctgactcctttcagaattagcatttcttccccttcgtgggtgctcttgagttccaaagaaaaggaagagaagccttcattgagcagcttcttctgccttagggactgtgctagggggtagatcgaccttaggggaaacaatccccgcttattagaggaggttttggatcagggtttgctttatttgaaatttaacaaatacagaaaagcagaaggaagaaaattgaagtaatccatgtttccactgggcgcggcggctcacgcctataatcccagcactttgggaggccaaggcgggcggatcacgaggtcaggagttcgagaccagcctgaccaacatggtgaaaccccccgtctctactaaaattacaaaattagccggtcgtggtggcacacgcctgtaatcccagctactcaggaggctgaggcaggagaatcgcttgaacccgggaggcagaggttgcagtgagccgagattgcaccactgcactccagcctgagcaacagagtgagactccgttgtctttaaaggccaatcccatagcaaatgacagagactcacttgagtaagaaaggtttttgacaagaaaacccacagaagaagagataagctgtggatataagaaaggcactacaatctgtatttaaatctaattgcacactagataatatatgtatgaaaaattatttaatccagtttcctgatttcattatatatttcttataaggttttcattaggcttttgtttttgtttttggttttaaataaaaacactttattgcacaaatcccacaaaggtctcaggccctgggtccaagcccacagccccaacctgtcccctggctctgggcctggtctttggtgcccaccctggcctcacatgccaacgtcttctgtggagtgtgcaggtgtccatgagcgttcctgtgttgggggaagcctgcctgggccacaagtagtcaggcactgtggcagcctcacgatgaagacaggtggggtggagttgggtccccacctgcccaggctcaggggccacaggggtctacacagtcctttctgctttgaaacacgtggtagatgctggtgggagggaacatggcaccggcaccaagcagggagcccacttggatggccacaccagctgccagcaatgccggccgacccccaccatgcagcagggagcttgcagccaccttcacatatgagaacacacacagacacagcacccacgacagcacctgcaagggaggacacagcagcaggctgagcatgacatgcacttgctccaggggacaccctcctccccacttcatgtctccacttgctcaccacaaggaccacccctgcagtggtgcccaccaggggtgggcaggggctcaggattgccagtgccatcaggtaggccccaaagagcatgcccagcagagaaagaccaaccagccctgccagggacctgttggggatgagcagagactcagggctggctgttctgggacctggaccccaaccttaagttccacccaccaagcctggggacccttttgcacctgcacagcacgcccatggccaggaagcaggcaagggggttggcggcactgcccagcaccacagccaggtggtaggccaggcgcccatagggcaaacaggaaaagctctgcacagaaggcagcacgccattggtcacggcactggtgaaggccatcaggcccagcaggaaggcaccatgggctgagaacagctgatgggcctcagggtctgggccagggatggtgcctgctgcctggctcggtggctcctgcaatggcaaagcctcttcttcctccttctcttcctcctctgctcctggggatcccagttgaagttcaggccctgagccccctgtggttacagagggtagtgatggcaacagcaacaggagaccccggaaggcggcagctgaagtgaccagaagggcagtcagtgcccagaagaaggtgctggcaggaaaacgctcagggaagtcgaggggaggcccagaggtgccattggtgggcgctggtgggcactcgaggcggcccacaccttgcactagggccagcacacaggggagtagggcactgagaccctgacccaggaagaaagaccgtaagaaaggaggtggcaggtggctcaggaagggcaggaaagtgacattagaggtacaacaggccattgccaacaccaaggccagagttaggaaggccacagagtggagctgccctgccactggggccacgtggtgccacagaggggccagcagggctgtgcccactacactcagcacctgtaccacctggatggggacctgctcgcccttgcccggggccagctgcctccacagggtcaccaccagcagacccaggtttcccagcgccacaaccacagagaggtatgaggggaggctccaacctgcagggaaggaatgatgccatgtcaggagcacagtggctaagggacaaagagctgccacaggccacctttctgggcatacctgccccacgcttccctgtacctccctcccactcaccctctggaaggtcttttaccaccacaggcagctccacccagatcccgttcacagcagcccaggagcccatgccaaaaagggccaccagcaggtgggtcagcaccagacggcccagcgtgggtgctgccattcagcccaaagctggaccctccaggacagggcaaaggtcacaggcaggtccttccctaggtaggtccaaagatgctttggttcttctggaaactgaagaccttctagctggagggaaacagacaggctggcaggtaataggctggtgggacagaaccggagtcagaagacaagtcggtcagactgctaagaccagggcaactggagggagaggtggccgggggcgggcggggaaggtggggagccaggacttaccacggggcaccggctgtgcgtttgggtacagcgacccagcagtgccggcaggcagacaggcagaaagctggcccgaggtgcagctgccccagaggagcaaagagggagctgattttcctacccacagaggacccggggtccaagttgtcaaaacagctcagcactggccgggtgcggtggctcacacctgtaatcccagcactttgggaagctgaggaaggcagatcgcctgaggtcaggagattgagaccatcctggccaacatggtgaaaacccgtctctactaaaaatacaaaaattagctggtcgtggtggtgggtgccagtaatcccagctactcaggaggctgaggcaggagattcacttgaacccggaaggtggaggttgcagtgagccaagatcacaccactgcattccagcctgggcgacagaacgagattcggtctcaaaaacaaaacaaaacaaaacaaaacaaaaaaacagctcggcaccaacacgctcaccctcaaatggaccccgggacaagggcacgtctctggtgccacttgcaaccctagcgcttttgcgacactcaggacttgctgaggcaggtcgagttggagaggggagtggctggggcgggctctgcccggaggggcgtctccgtgctgccctcccgcctgcctcaggggggcatcccgggagccgccaggtgcgcaggggtccccgcacctccggatccggcagtccccggacccagcggctggcggtctgcctgagagggagccccctccgccggggaggcggcccagcccagagcccacacagctggggttttgttgtttgttgttttaattaattaattaattttgagacggggtctcactctgtcacccaggctagagcgcagcggtgcgcgatcgcggctcactacagcctcaacctcccaagctcaagggatcctcccactcagcctctccccacccccccacaagtagctgggaccacaggcgagcatcaccatgtccagctaattttttttttttttttttttttttttggtagagacaaggtctcactatgttgctcaggctggcttggcactcctgggctcaagcaatcttcctacctcagcctcccaagtagctgggactacagacgcaccacacctagctaccgccacgctcagctgtttttacactttttttttttttttttttttttgagacggagttttgctcttgttgcccaggctggagtgcaatggcacgagcctctgcctcccgggttcaagccattctcctgcctcagcctcccgagtagctggaattacaggcgcccaccaccatgccctgctaatttttgtctttttagtgcacagggtctcgccatgttagctaggctggtcttgaactcctgacctcaggtgatccacctgccccggcctcccaaagtgttggggattacaggcgtgagccaccgtgcctggccagctgtttttacacttttaaatggttgaaaaaaaattagctggacgtggtgtgca[144 bp omitted]gactcccgagtagctgggattacagacgcctgccaccacgcctggataatttttgtatttttcgtagagatggggtttcaccata[137 bp omitted]cagggattaccctgacctactacccatttttgtatggcctgctagctaagacaggttttcacatatttatttatttatttttattactatttttgagaaagtgtcttcctcaaaaggaagtgcagtagcacaatcacagctcactgcagcctcaaatacctgggctcaaggatcctcccacctcagcctcctgagcagctgggactacaagcacatgccaccacgtccagctgtttttacatttttaaatggttggaaaaaaaaatcaatatctgtagtcccagctactcaggcgtctgaggtgagagcatcccttgagcacaggaggtcaaggctgcaatgagccatgattgtgccaatgtactccagcttgggtgacagtgagaccctgtctaaaaccaaaacaaaacaaaaaacaaagaaaacaaaagaatcgtatttcctaacccgtgaaaactaaaagcatatgaaatttaaatttcggtaggccaggcgtggtggctcacgcctgtaatcccaacactttgggaggccgaggcgggctgatcacctgagatcaggagttcaagaccagcctggccaacatggtgaaccccgtctctactaaaaatacacaaattagctgggtatggtggcgggcgcctgtaatcccagctactcgggaggctgagatatgagaatcgcttgaaccagggaggtggaggttgcagtgagctgagcttgtgccactgcagtccagtcgagacaacagagcgagactccatccacccccccaaacaaaaaaaaatttcagtgtccataaataaaatactatcagaacacagccaagcccattcatttacctattgtctacacctgctttcctgctataagggcagagctgaatggtttccacagagactgtgtggccctcaaagcctaaaatgtttactgtctggccatttacagaacaagtttgctggtctatctccctcactaggatgtacgtttgcgcggaggaggcactttgtctatttcactacctaccctattctcagtgatcattataccacataggacgtgctcaaattgttgttgaataaataaaccaataataccctaaaatctgtttctttctttcttccaataataccctaaaatctgtttctttctttcttccttccttttttttttttttttttttttgagacggagtctcactgtgtcgcccaggctggagtgcagtggctcaatctcggctcactgcaagctctgcctcccaggttcacgccattctcctgcctc[135 bp omitted]cagcctcccaaagtgctgggattacatgtgtgagccactgcgcccggcctaaaatctgtgtttcaaaaaacacaagcctgacacagtggtgtgtgcctgtaattccagctactcaggagcctgaggtgagaggatcacttgagcccaggaatttgaggctgcagcaagccatgattatgccactgcactccagcctgggcaacagaaggagaccctgtctcttaaaaaaaaaatagtaaaataaattttgaaagcttcctaggtgactctgatgtgcaaccaagcttgccctcactgcttagggaaaggctaaaccagacagaaatggggtcacatttagtttcccacagtaataccaaacaatgatgtttctaatactccaagaggatgagaaaagacaccatttatccagcacttttctttttttttttttcgagacagagtcttgctctgttgcccagactggcgtgcagtggcgcaatctcggctcactgcaagctctgcctcctgggttcacaccattctcctgcctcagcctcctgagtagctgggactacaggcgcccaccaccacacccggctaatttttttgtattttttagtagagacggggtttcaccgtgttagccaggatggtctcgatcttctgacctcgtgatccgcccacctcggcctcccaaactgttgcgattacaggcgtgagccaccgcgcctggcctatccaacacttttcttgttatatgccaggtactggcataaatatttaaaaaatattaacaaacaatcctcccaaaagtccaatggagtggctactattatcaatactccattaaaaggaaactggaaaccgaggcacataaagattcagtcagccgggcgcggtggcctcatgcctgtaatcctagcactgtgggaggctga[133 bp omitted]gaggcaggagaatcactagaactcaggaggcggaggtcacagtgagctgagatcgtgccactacactccagcctgggcaacagcgagagactccatctctaaaaaaaaaaaaaaattcagtcacttgtccaaccttccacaggtagggagcagagccaggatttcagtgttggtcacggtctaactgcaggaactgtccccttaacgtaggtgatcacctcaccccttggccaaacaccctgccactgcctatctgcaaatcagtaattgacaatttctcactctgccacccaggctggagtgcagtgtgtgatctcggctcaccgcaacatccgcctcctgggttcaagtgattcccctgcctcagcctcccgagtagctggggttacatgcacccaccaccaagcctggctaatttttatatttttagtaaagatggggtttcaccatgttggccaggctggtctcgaactcctgacctcaggtgatccgcccgcctcggcctcccaaactgttgggattacaggcatgagccaccgcgcccagtcagtaattgacaatgtatagacaatagttccctatatgttagggaccttgcagaagagggaaagaaaaattataaagtgcagatgcttctcttggaatgactttgggacaaaagagatcaccatgtccttaggaatagagctccaactaaagaaaggcagaatgctagagaggccgcgacaggagaggcaagacccacatggagggagtcaaggagccggctataaatggtgaacggtcattgttggatgtgtgcctggggtggttgtgatgtgtaggattacaaaagtgccttgtgtgcgggccccactgagggatggatacttgaagtagaaagtggaagaacattacttaatgaaggagaacatcactgagcactggcgggtccctagatcaaatttgttcttttccttcttttttttgagacagggtgttgctctgtcacccaggctggagtgcagtggtgtcatcacatctcactgcagccttaaactcccaggctcaagtgatccacccagctcagcttcctgagtagctgggaccacaggtgtgcaccaccacacctggctaatttttaaattctttgtagagactaggtcttgctctgctgcataggctgctcccaaactcctgggctcaagcaatcctaccacctcagcctcccaaagtgttgggattataggcatgaaccaccgttcctagtccaaatttgttcttgcgtggggtgagaggactaatgcaaatgataagatctgtcattgtggtttcgacactacgtgcctcaaaccttagcttctccctgaattttcagaaaagagcaagggatggccttggggtctggtgcacggggaataaccaaggggaccgaaggtctaactcgccaaggtgcagaatcctcacctggaagatccctctgctccttggtagatgggctacctggtactctgttgtggccacacagccctaaggctgttacttggcagttcagttcaccataaacctatcataaccctatagcaccgaatagcacttttttttttttttgagatggagtctcactctgtaacccaggctggagtgcagtggtgcgatcttggctcactgcaagctctgcctcctgggttcacgccattcttctgcctcaacctcccgagtaggtgggactacaggtgcctgccac[186 bp omitted]agtccagtggcaagatcatagcttgctgtagccttgaactcctgggctccaagtggtcctccagctttgacctcccaagcagccgggaccataggtgtgtgccagccaccacggctggctaattttttacttttatttttacttatttatttatttatttattttgagatggagacttgccctgttgcccaggttcgagtgcagtggtgcaatcttggctcactgcaacctctgcctcctgggttcaagtgattctcccatctcagcctcccaagtagctgggactacaggtgcacaccaccatgcccagcgaatttttttttgtttctttgttttgttttattttgttttgtttttctgagatggagtttcactcttattgcccaggctggggtgcaatggtgcgatcttggctcactgcaacctccgcttcctgggttcaagtgattctcctgcctcagcctcccgagtagctgggattacaggcacccaccaccctgcccagctaattttttgtatttttagtaaagacaagatttt[132 bp omitted]c[148 bp omitted]aacttctaggctcaagcaatcctcctgcctcagcctctcaaagtgctggtattacaggcgtgagtcaccatgcccagccgtccaacttccaatttttcactgcccctaatttctttacccagaaagtacctggaatcctagacaatggttagggcttctattctgaagacctcactgcagcatttagcattctcgtgttggggatggatagggagagggcgcacacaatccctgcagccttctggggcacggggctggccttacagtaagcacttgaaggcccttcattcatgaactgttgtgcaggggataaactcttcctactgacttcctcttgaacccctgtcccacttcccgtgtctgtgtagagaaagctcaccacagatgaatgtactgtcttcctctgccttctgctccggcagcagctctccaccctctcctctatctcaggaacacctggcctcagagctcaggggaggaggtaagcccaatcagtctgaatccttatcttattccttctggcttcaatctggcttctcctggatcttgaacccttccctgtgggttaaaaggccatagtcctctttttttttctttgttgagacggagtttcacttttgtttcccaggctggagtgcaatggcgcgatctcagctcaccacaacctccgcatcctgggttcaagtgattctcctacctcagcctcctaagtagtagccaccgcgcctggctaattttgtatttttttttttttttagtagagacaggctttctccatgttgaccaggctggtcttgaactcccaacctcaggtgatctgcccccctcggcctcccaaagtgctgggattataggtgtgagtcaccgcgcctggcaaaaggccatagttcttacccctccagcgtgactgtctctgggcctggcttggttttgacaactcacctggggggcagagaaaacccagccaactggtacaacttaaacctttagggtgaatttaacattgccttgtctcctgcccgaacagatacctctacagagcaaacattttgtgagataagcccatagatgaggtttgatactcttccattaaagactggggaatatttggaactcaaatctcagcggggccttgagtggcaacactggctttcaagggctggaaagaactttcgagaacatttaatccatcatctcattgtactcttttttttttttttttcttgagacggagtctcgctctgtcgtccaggctggagtgcagtggtgcaatcttggctcactgcaacctctgcctcctgggttcaggtgattctcctgtctcagcctcccaagtagctgggattacaagcacccaccatctcgcctagctaatttttgtatttttagtagagatggggtttcaccatgttggccaggctggtctcaaactcctgacctcaggtgattcacccgcctcagcctcccaaagtgttagcattacaggtgtgagccaccacgcccagccaatcatcgtattcatttttgaaagtatttatggaaggcccactgtatagaatgcattttgttatgtatttggatgacacaaaggcatataatatacataagtaaaatcttacaaggcctggccctgtccttcctctcctacctcctttctagcactctcggcctcccaacaaattgcttatggttctctgcagaccccacactgtgtcctacctttgtgcctttcctcttcctggaagatcctccacacctcacagcccccctctactggctggcttccactcaacagtgagtctcagcttagctgctgtagcctcaggaggccttgactctctcagactgggttaagtatctccctccctccctcccttctttccttccctttctttctttatttttctttattattattattactttttttgtgatggagtcttgctcttgttgcccaggctggagtgcaatggcgccatcttggctcaccacaacctccgcctcccaagttcaagcgattctcctgcctcagcctcccgagtagctgggattacaggtgtgcgccaccacacctggctaattttgaatttttagtagagacaaggtttctccatattggtcaggctggtcttgaactcccgacctcaggtgatccacccgcctacggcctcccaaagtgctgggattataggcgtgagccaccgtgcctggccacctttcctttctttctgcaggatcttgctctgttgcccaggctgtagtgcagtggtgtgatcacagctcactgcagccttgatccccagggctcaagcaatcctcccacctcagcctcttcagtagctggggctacaggtacatgccactacacctggcgatttttttagaatttttattttttggtagagacagggtctcactatgtggtccaggctggtcttaaactcctgagatgaagcaacactcctgccttggcctcccaaactgctgggattacaggtgtgagccactgcgcccagcccccctttctttttaagcttaccttatcaccacacttaccatgtgatcatgaaattatagactttgtgcttgtcatgtcgtgccttgaccctggactccttgcctttagggattgaaccttattcacccttttagtgagacccagattctcctctaatagggactgcagcctagtaggagagagaaggcagcatgatctcctaacatgactccatcagggtgggcgtgatagatgccagaagagcagtacaaatgaggaaactgaggctgtggcttgcctgaagtcaccttcagcttcttggcaggtggccagagctggaagtctacctccagttggacacaggagcctgggaaggaattcgaaagcaacccaacctttcacctcagagctgaagtccttgagcctcggggcagttgtgactaagatcaggagcccacagcctaaacgggggaatgttctgggtgacgaggcagtgaggagtagtgaaaggagcctgagactgggcaccaggagacctgggtcttggttcatgctctgttccacctgacctctcaccttcaattcactttagtccgtgatgagaacccttgggtcaaatgggcctccccaagatgtcacatctttttctgagcgtaaggtgacttatgtccttccccaagcatctcctggccaataaactgcccttccttaagatccagctcagcttctacctcctgagtgaaacctcttcatcttcctcaccaggtgtaggctgagggcttctcttccctcctctgaactcccatagaaaaaatttactggctgggcatggtggctcacacctgtaatcccagcactttgggaggctgaggtgggtggatcacctgagttcaggagtttgagaccagtatggccaacatggcgaaccctgtctctactaaaaaaaaatacaaaaattagccgggcatggtggcgtgcgcctgtaatctcagctactcaagaggctgaggcaggagaatcttttgaacctggaaggcggaggttgccgtgagccgaggtagtgcctctacactcctgcctgggtgacagagcaagatgccgtctcaaaaaaaaaagaaaagaaaaaatttatgttcccttcttaggaagctgaatcttgtcctgctttactgtttacttatgtgcttatcttgttttcccctagtaatttacccccattacattttcccctctcaagagcaaaggccgtattggtttatgtagcttccttattacctaatttatggtagatgttcaaatgtttgtggttttttgtttgttttttttttttagactttgaatctcactctatcgcccaggctggagtgcagtggcatgctcctggctcaccacaacctctgcctcctgggttcaagcaattctcgtgcctcagcctcccaagtagctgggattacaggcatgagccaccatgcctggctaatttttgtatttttttagtagagaaggggtttc[131 bp omitted]cctcttatcagtaaactgcagtggccaaaggcatggaatctgagacacccgctagctgtgtgactttgggaagtcacttaagctttctgtgctgaaatgtccccaacagtaatagggacataatgatgccaacttcatgaggttgtgctgaggcatcgatgggcacctggccccatgcctggcacatggtaagcactgtcagtgttagctcctaggcccttcctccttcaaaatgtgtcagagctggcagctcacacctgtaatcccagcactttgggaggcctaagcgggtggatcattcggtcaggagctcaagatcagcctggccaacatggtgaaaacccatctctactaaaaatacaaaaattagccaggcatggtggagggcatctgtaatcccagctacccgggaggctgaggcatgagaattgcttgaacccgggaggcagaggttgcagtgagccgagattgcaccactgcactccagcctgggtgacacagcgagactctgtctaaaagaaaaaaatgtgtcagagctgtgaagctgtccttgctactgaaacactgtgggggaatgagacatttcccctgcccaaggggcttcttcctcgacctccaaatctgctctgaccgatctactgataagtggtgaaaccctcccagggagcttttcttgtcctagatatttgtgtggattacttggtttgggtc[163 bp omitted]cctggtggcgggcgcctgtagtcccagctaatcgggaggctgaggcgggagaatggtgtgaacctgggaggcggaggttgcagtgagcagagattgcgccactgcactccagcctgggcaacagagcaagactctgtctaaaataaataaataaaataaaataaaataaaataaagtagagtgtagatttacttttgagacagggtctcgctctgtcacccaggttggagtgcagtggcacaaccacggctcactacagcctcgacctcctgggctcaagtgatcctcctgcctcagccttccaagtagctgggaccacaggcatgtgtcaccactcctggctaatttttaaagtatttgtagagacaaggtctctctatgttgcccaggcttgtttcgaactcctgggctcaagcaatcctgtcttggcctcccaaagtgctaggattacagccatgagccatggcacccagcctagatttacttattaattgatgtggggtgtgtgtgtgtgtgtgtgtgtgtgtgtgtgttttacaagaaggaatgcctttagatagcttcctgattttcagagaaccctcagatgttttcatattggtagagttaattagagctagaatagtaatgccactggggttaataactattcggtccaggagtgaagtcagcatcttaggatcaatgtggtttacgacttcctggaacaaagacagttttccacaacaaaccctcaaacagatgtaggttctagtaataaacatgatcagactcaaggtttcaaggttgcaaagtgacaattctcacagttatgaaaatgacctttctaggaggaaggaaaagctccttgccccttatagaaaatcaaaacaaactgaaacccagttttagcgggccaagatacagaataagtcaagatttaacttaaattttatggccactggtatgtaaaaatttccccaccttatttcttgtccttctgaaaaacaaaggctaatgactaacccagggccttgcattctctaaccatttcttttcttcttcttctttttttttttttctgagatgttgtcttactcttgttccccaggctggagtgcaatggcgcgatctctgctcactgcaacctcggcctcctgggttcaagcaattctcctgcctcagcctcccaagtaactgggattacaggcgcacaccaccacacctgctaatgtttgtatttttagtagagacggggttttaccatgttggccaggatggtcttgaactcctgacctcaggtgatccacctgcctccgcctcccaaagtgctcggattacaggcgtgagccaccatgcccggccacattttctaaccatttcaatctgcatccaaattctttggtttaaagggtttttttttgttttgttttttgttttgttttgtttttaaatggagtcttgctcttgtcatccaggctggagtgcaatggtgcgatttcggctcactgcaacctccgcctcctggggtcaagcgattctcctgcttc[224 bp omitted]ttaggatgaaagagactgaggtgctgaagtgggaggtggagaaataacacaaatagtggagtgaaagctgggctacaacccagtggagggaaaacaaacatgttccacatggatttccaccaggcatggtggctcatgctgtaatccaagaactttgggaggccggggagggaggattgctttgagcccaggagttcgaggccagcctgggcaacatggcaaaaccccatctctacagaaaaaaaatgccaggagcggtggctcacacctgtaatcccagcactttgggaggccgacgtgggcagatcacgaggtcaggagaccaagaccatcctgaccaacatggtgaaaccctgtctctactaaaaatacaaaaattagttgggtgtggtggtgggcgcctgtaatcccagctactcgggatgctgagccaggagaatggcttgaacccaggaggcggagg[132 bp omitted]gaagcaggagaatcgcttgagcccagaggtggaggttgcggtgagctgagttcacaccacagcaccccagcctggagcctaggagtttgaggcctcagtgagcccagatcgcaccactgcactccagtctgagcaacatcctgtcaaaaaaaaaaaaaagaaaagaaaaaagaagtaaacatgtttctttgatttcaattgtctattaaccacaatgaaagcctgaagctcaaagcagctattcttttgcctgtttttgctcccctacaccactaataatttctgttatagaaactttgactattttaaggctcccggttatagctgtgcttcttttcacagagcctacatctggcaccagacagaggcctgcagggaaagtgagccttctcaagccctgcattctttcaaagaggggacaaactacagacactcattttgggtgtcttcccaggcacgggtgctgaaattatcctctgttctggtgtggggcaagggtgggattggaggaagctgcctgggcaagcgaggtcctcctcacgctgttgcttgtcacctttcaagggcatttattttgcttctggtctgataaacaaataataagattttccgtggaggactggacaatcagaggaacttcaagaggaggggcatattcctgcctttgggacacgaggaaggaaaggagaaaggaaaagatagacttagaaagcttcactgcaggccagatgcggtggctcaaacctgtaattccagcactttgggaggccgaggcaggtggatcacctgaagtcaggagttcgagaccagtgaaaacccgtctctactaaaaatacaaaaattagccgggtgtggtggcaggcatctgtaatcccagctattcaggaggctgaggcatggaatcacttgaacctgggaggcggaggttgcactgagccgagatcttgccattgcactccagcctgggcgacaagagcaaaacatcgtctcaaaaaaaaacaaaaaaacaaaaacaaaaacaaaaaaaaccacagcttcgctgtgcatccttgagctgcttttctatttcagttgaatgcatattgcagtttatcatgatcacatgcaagcgctgccctacagctgggcggtgagttcagagcgattaccatggagactgagagaagattgcgtatcatccccccaaacagcattccagcgtgggaacgccaaatccagatgtgaagaacacaaacaaacagtatgcaaaagttcagaagttagactgtttttgagattgtgccattggactactgaaaagagacataaagatgcaattccaacatattgtatgatcctgtttatatgaaatatatagaatagacaaacctctagaaatagtctcacctgtccaggctcagctcagagtgccactccagtaagcacagacaagttaataagtcaaaagatacaggttaatcccaggcatagtagttcgtgcctgtaatcccagcactttgggacgctaagggggcgtggatcacctgaggtcaggagttcgagaccagcctgaccaacatggcgaaaccctgtctctactaaaaatacaaaattagccgggcatggtggcacatgcctgtaatcccagctactcgggaggctgaggcaggagaattgcttgaacccgggaggcggagattgtggtgagccgagatcatgtcattgcattccagactggacgacaagaggaaaactccgtatcaaaaaaaaaaaaaaggaaagaaagaaaataaaagatacaggttagagacatatcctatcactgtgacattgataaagatcatattgtaaaatggtgaggggggtggtatgaaatatttcatgggaaatacacatggccaatagacatgtggaaaagatgctctccctgactgtatatatcaaagaaaggcaaattaagacatcagtaggataccatttctcacttgaaaagaaaagaatattttaaaggccaggtgcaatggcccatgcctgtagtcccagcactctgggaggctgagatgggcggatcgcaggagcccaggagttcgagaccagcccaagcaacatggcgaaaccccatctctacaaaaaataaaatttagttgggcatgctgatgtgcacctatagtcccagctactcaggaggctgaggtgggaggatcccttgagcccaggaggttgaggcttcagtgaactggggtcacaccaccgtgctccagcctgggtgaaagagcgagaccctgtctgaaaaaagaaaaataatacttttcagataatttgattggttggaattcagtgaaagaatctcaaaccctgctgctataaattggtagatgaaggaggaattcagttaccagaagaggaacagaggcactgggtaggtaaaagcaacaagggctcattacaaagcttttcttattttggtctttttttttttttttttcctggataagtctcttgaaatagaattattgggtgaaactgtatgacatagctgaggctcttgtaacagactgccaagtttctttcacaaatggtgattctaatattcctttgcattagcagtacaggggtgtgccccatgccacca[137 bp omitted]ccctgtctctactaaaaatacaaaaattagccgggcgtggtggtgggcgcctgtaaccccagctactcgggaggctgaggcaggagaatcgcttgaatcagggaggcagaagctgcagtgagctgagatcacgccactgcactctggcctgggcaacaagagcgagactccgtctcaaaaaaaaaaaaaaaaaaaaagaaaaaaagaaaagaaaatgaaagacaaaataacacctataagccaagtgaataaagggcaacaggactacagattttttttttttttttttttttttttgagactgagtctcgctcttgttgcccaggttggagtacggtggcgtgatcattagtcaacacagcctcgacctcccaggctcaggcaatcctcccacctcagcctcccaagtagctgggactacaggcgttgcattaccatatctagctatttttttgtttagaaggatctcactctgttgcccaggctggaatccaatggtacgatctcaactcactgcaacctcttcctcccaggttcaagggattctcctgcctcagcctcccgagtagctgggactataggcatgtgccaccatgcctggctagtttttgtatttttagtagagatggggtttcaccatgttggccaggctgatctcaaacttctgacctcaggtgatccgcccacctcagcctcccaaagtgctgggattacaggtgtgagccactgcacccagccaaccagctaatttttgtagagacagggttttgccatgttgcacagactgatctggaactcctggctcaagtgatcctcctgccatgacctcccaaagtgctggtcagatctcagcttggacactacaccaagccacgaggaggtctccggatttttgtgcctcattttgggcaactgctaaatgaggggcttggactggctgatttttaagtttcttgtggcattaatattttataactctataataacagcttctctacagctttgaaaggtttggaacagaggaagaatacctgacatttatttgttgccaggagctaggacaaactgatactcagcggaaggagtcctgagaataaagaagtgcagaaaatggctggtgtcagtccacagatgaccagactcgttcactgggacatgtaagacatcctttaggggtttgcacaaatagctggtgagtactttgtctggatttgtgggtctacactgatgagtggggccaagagccagagacacagaagctatgtttttgtttgtttgtttgtttgttttttgagatggagtttcactcttgttgcccaggctggagtgcaatggcgtgatctcggctcaccacaacctctgcctcctaggttcaagtgattctcctgcctcagcctcccgagtagctgggattacaggcgcctgccaccatgcccggctaattttgtatttttagtagagacgaggtttctccatt[138 bp omitted]caacccaactttctcacctgccagtagtaccctgactttccagtcatcccggctcaaaccgtgtcctttttgactccttgcttcttttatttgattatagttacagccagcaagtcctaacagcttgttcattcaacagatattctggagctcccatttgctcagcccacactgatttctttcctcttacagcatttgcatttggtacactcggcttggcacctgagaatacttttcttttcttttttttttttttgtttgagacagtctccctcttgcccaggctggagtgcagtggcacgatcttggcttactgcaacctccgcctcctgttcaagcaattctcatgcctcagcctcccaagtagctgggattataggcatgcaccaccacacctggctaattttttttttttttttttttttttttttttagtagagacggggcttcaccatgttgctcaggctggtctcgaactcctgacctcaggtgatccatctgccttggcctcccaaagttctgggattacaggtatgagctgctgcacccggccagatttcacttttcatttgaggtgggtgcccctaagtgtactgacttcacctcatctgtaactcctcttaggcaagggtaacatctcacacctctttgtatctttcccaggacctacttcacagtcctgtgttccactgtaggccctcattctctatatttgtatgtacctagatagtgtgggtctaggctctggggacagagcagtgaaaaaaaaaacctaacaataatccctgccctcgtgaattatacaatcagaggagaaaacaaaacaataatttaaaaagtaaataaaatatgtagtacgggccgggcgtggtggcttatgtcttaatcccagcactttgggaggctgaggcaggtggatcacctgaggtcaggagttcgaaaccagcgtggccaacatggcaaaactctgtctctactaaaaatacaaaaattagctggatgtggtggcacatacctgtattcccagctacttgagaggctgaggcagaagaatcgcttgaatccaggaggtggaggatgcaggagcagccactcccgtgcgggtgacagagcgagactccgtctcaaacaaaaacaacaaaaacaaaaacaaaacaaaacaaagacaactgtttagaaaatataaagtgagaaagggggctataaagtgtgtgactggagggaggtaggacactgaactattagataggatggcagacttttgggtagagtataaaagaggtgaaagagacataagggctctggaggaagagcattctaggaagagagaataggatatgcaaaggccctgaggaaggaatacgtctcataccatccccagacagcaagaacatggaggctgtttgttgcatttcccgtcctgcattacaataaaaaaaaaaaaaaaaaaaaaaaaaaaaggcaggcctctagcagctcgaaatagcc[146 bp omitted]accccgtctctactaaaaatacaaaattagccgggcatggtggtgcatgcctgtaatcccagctactcaggaggctgaggcaggagaattgctagaacccccgggaagtggaggttgcggtgagccaagatcgcgccactgcactccagcctgggcaacaagagcgaaactccacctcaaaaaaaaaaacaaaaaaccatagatttttaaggcctcggcactgccatactatgacatgggcctaccctgggtggtcattgtcccatcttgcacagcccccaacctcttctctggaggacaacgacagcacaagaaagcgctctgaagatgagccgcatcaccactcttccagctcaccatcgatttggaagcctagagaggatcggcctttctaggacaatagacggttccttctcctcacctagagtggccctaagaggacgagggcgcctccctggtcctccaggggagtgtgcatccccaggtgcacagggaaacgagctctcatcctaccacccttgggcttttacagatgcttttctccccttcactttctttttcatttcttttcttttcctttttttttttttttttttttttttaatttttgagacagagtttcgcttttgtcacccaggctggaatgcaatggcacgatcccggctcactgcaacctctgcttccgggttcaagtgattctcctgcctcagcctcctgagtagctgggactacaggcacccgccaccatgcctggctaatttttttgcatttttagtatagacggggtttcaccgtgttagccgggatggtcttgatctcctgacctcgtgatccgcctgcctcggcctcccaaagtgctgggattataggtgtgagccaccgcacttggcctctttctttctttttttggagttttgctcttgttgaccaggctggagtgcaatggtgtgatcttggctcaccacaacctctgcctcccgggttcaagtgattctcctgcctcagcctcccgagtagctgggattacaggcatgcaccaccacgcccggctaattttgtatttttagtagagatgggatttctccatgttggtcaggctgatctttaactcctgacctcaggtgatctgtccccctcggcatccaaaagtgctgggattacaggcgtgagccactgcgcccagcctggtctgtgtttcttttactgctgtcagtttcttgttcaggttcacaaatttgttatatatacataacaaatataatatttaatatatatatacttttttttttagcctcactctgtctccgaggctggagtgcagtggcatgatctcgggtcactgcaacctctgcctcccgagttcaagcaattctcgtgcctcagccttctgagtagctgggattacaggtgggtaccaccatgcccggctaatttttgtatttttagtagagatggagttttgccatgttacccacgctggtctcaaactcctgagctcaagtgatccacctgccttggcttcccaaagtgttggggttacaggcgtgagccgcggctcccagcctacggatatatatactcttaactacagtctgtaccagcctgggcaacatggtgaaacccggtctctacaaaaaaatacaaaaattagtcaggcaaggtggcgcgtgcctgtagtgctctgagcatgcagagcattatattaagtactttacttcagataactttgattttacatgtccacctcttccattagactgagtgtaactccagtgtgctcaataaatgcagagatcttaaaatatgtttgactgattttttttttcttttagagacggagtcttgctcggtcgccaggctggagtgcagtagtgtggtctcagctcactgcaccctccatctcccgggttcaagcaattctcctgccccagcctcccgagtagctgggactacaagcgcgcaccaccacgcctggctaatttttgtctttttagtagagacggggtttcacta[131 bp omitted]ttcaaatttcgtttaaggttactaagtttagtaagagtcagcaatccttttggcccttagggaactctaaaccttctgtgattttcagcatagaacttcaccagtttaaaaaaaaaaaaaacacaaaccttctaggaagaagaaaaagttgagaggaagagagaaataagagtagaagtgggaaagaaacacaagaagagaagaaatggccaaagggcaaagcggcaggtagggagggcatatggtaggaagggccacagcccctaaaggcaggtcagggataggtgagagtactgaatccacaggctgcccacactgagaacttccctgttgaaaagaatcatcactgctttatcctttgttcagtcctgccactaaccccattggtttctcttgtgatgacccaatattccttcccccagcacaaatttccgagtttgttgaggacacaggctgtcctgccctgttggttcccactttggaagccacagtgtttttgggaaccacttttttatgtttttttttgtttttttttttgagacagagtctcattctatcgccaggctggagtgcaatggcacgatttccgctcactgcaacctccgacttccgggttcaagcgattctcctgccacagccttccgagtagctgggataacgggcacgtgccaccatgcccagctaatttttttttttttagacagagtttcactcttgttgcccgggctggagtgcaatggcatgatctcagctcaccgcaacctctgcctcccaggttcaagcgattctcctacctcagccccacaagtagctgggattacaggcatgtgacaccatgcccagctaatttttgtatttttagtagagacagggtttcaccatgttggccaggctggtcttgaactcccgacctcaggtgatccacccacctcggtctcccaaagtactgggattacaggcatgagctaccacgcccagccttttttttttttttttttgagacaggttcttgctctgtttcccaggctggagtgcagtgtcacaatcttggctcactgcaacctctgcctcctgggctcaactgatcgtcccacatcagcctcctaagtagctgggactacaggcaagcaccactacgcccggctaatgtttatatttttgtttgtgtggaaacagggtttcaccatgttgcccaggctggtctcgaactcctggactcaaaggatccacctgcctcagcctctcaaagtgctgggattacaggcatgagccaccctgactgttaacccattttatgggtgtatcttaattaattaaaccacttccctgtggatacatttaaactgtttcacactatttggtgttatgaacaacgttgcaccgaataactttgtattcatgtaaatttacagacaagagtatctgcagaatacgtttgggaagtggatttgctcagtcaaagggtgcatgactattacctttgggaagatttgctctccctgtaatttgtaccaatttgcaatcctctaacaatgaacaagtgctcttacctcccacccctgcccccaacaaagttgtatcattaaaaataatcttgcccggcgcagtggctcatgcctgtaatcccagcactttgggaggctgaggcgggctgatcacgaggtcaggagttcaagaccagcctgaccaagatggtgaaaccccgtctctactgaaaaaaaaaaaaaaaaaagccaggcttggtagtgcgcctgtaataccagctactcaggaggctgaggcaggagaatagcttgaacccaggaggcggaggttgcagtgagcc[135 bp omitted]aacaccatatgtattagtttgctcaggctgccatgatgaaataccatgtcatcatttttcctctgtctcaaggacacaggcacccatgtctgggtggcttaaaccagacatttattttctcacagctgtggagggtagacgtccagtatcaaggttccacccaatttggtttctggggaaggctctctgcttggcttgcagatggctgtcttctcgctatgtcctcacgtggcctttcctctgtgcaagtgtgcaggttatggggaggtggtggtggggcagttaggggagtgctggggagagggagggagaaagggagaggatgagagagctctctggtgtctcttctttctccttcttcctttctccctcctccctcctcccccctcctcctcctcctccttctcctccttcctctacttctccatctccatctccttctccttctttcttctttcttcttctccttctccttcttcttcatctctttttttgagacagggtctcaccctgtcgcccacgctgcagtgcagtagcccagcgatcatggttcactgtagcctcagtctccttggctccagtgatcatggttcactgtagcctcggtctccttggctcaagggatcctcccacctcagccttctgagtagctgggaccacaatcatgcaccaccatgcccagctaatttttaaattttttgtagagatggcatctcactatgttgcccaggctggtctgaaactccatggttcaagccatcctcctgtcttgacctctcaaagtgttgggattacaggtctgagccactgcttctggccagggcctcaaatttatgacttcattgaaccttaattacttccaattaattattccaaatatagccatgccatgagttgggtctttaacgtatgaattttttgggaacacatatattcagtccataacgctatactctaatcagagaattcatattatggaagaatcctatgaacagagtagatgtgagagcacttttttttttcttttgagatggagtcttgctctgtcacctaggctggagtgcagtggtgcgatctctgctcactgcaatctctgcctcccgggttcaagtgattctcctgcctcagccttctgagtagctgggactacaggcatccaccaccatgctcactgatttttgtatttttagtagagatggggttttaccatattggccaggctgttctcaaactcttgaccttgtgatccacccaccttggcctccgaaagtgctgggattacaggtgtgagccaccgcgcccagcagtgagagcactttcaaagggaagttagagctcattagatattgttgaattcatagtagaaagacttatgaatgtaataaatgtgggaacatttttttgagacagagtcttgctctgttgcctaggctggagtaaagtcgcatgatcatggctcactgtagcctcgacccctcaggctcaagcgatcctcccacctcagcctcccgagtagctgggactacaggtgcgtgccaccatgcctggctaattgttttagtttttgtagagacagggtctccctatgtggtccaggctggtttggaaattctgggctcaagtcatcctcctgcctcggcctcccaaagtactgggattacaggaaagaaccaccacccctggctggaaaatatttcaggtggtgatctcaacttgttcaacatcagataattcatttggggggaaaaccctgtaagggcgtcgagtgtggaagagccttcagctagagcttaggtcttactgaacatcacacaa[133 bp omitted]ccaa[131 bp omitted]taacccgtctctattaaaaatacaaaaaagtagctaggcgtggtggtgggtgcctgtagtcctagctactcgggaggctgaggcagagaatggcgtgaacccggaggcggagcttgcagtgagctgagatcatgccactgcactccagcctgggcaacagtgcgagactctgtctcaaacaaacaaacaaaaaatatatatatatacaaaaaaaaattagcgaggcgtggtggtgcgtgcctgtaatcccagctactcgggaggctgaggcaggagagctccttgagcccgggaggtggaggttgcagtgagccgagattgcgccattgcactccagcctgggcaacaagagcgaaactctgtctcaaggaaaaaaaaaaaaaaaaaaagtaaggagtgcaggtaaatatttagctataatttagccttactagagacttcatgttagaagagaaatcctttgaatgtaaagactgcaggaaagcctttcctcagaatcctcatcttattctacatcaccgaatttgctcaggagagaaatcccataatttattgaatgtggtcagcctttaatcagagctcaaatcttcgtccacatcaaagaattacctctggggagaaaacctgtgagtgacataaatattggaagtcctgcaattatagttcatgccttactctaccccagataattcatatcagagagaaactgtttgaatgtaacagatgggtaaatgctgtctggcctaggtcaatctttatgacaatatcaaataattcgtctcagggaataatcctatgactgcaatgaaagagaatatcttcggccagtctaagaaaacaccacaaacataagagtatgcatgtttatacatatctcttgatatcaaaataattagaaaaaatctagaggaggtggattagtccacatactgaatttcatgggttaactgaaatttagacaaatgattgaagactctctgtctagacaaagtggcagctgcatcagggagacctgggactcaactgtccttcctcatccactttcccggccacagttgaaattcttgtctgtaggttgctggcgccacctgatgcccagcaagaaaactgcctcttta[133 bp omitted]ctcccgggttcaagcgattctcgtgcctcagcctcttgagtagctgggactacaggtatgcaccaccatgcccagctaatttttgtatttttagtagagacaaggtttcaccatattggtcaggcgggtcttgaactcctgacctcgtgatccacctgacttggcctccctaagtgctgggattataggcgtgagccactgtgcctggccttcttttctttttcagacagagtcttgctatgtcgcccaggctggcgtgcagtggcgcgatctcgactcactgcaacctctgcctcccgggttcaagcaattctcatgcctc[131 bp omitted]acctgagcttcccgaagtcctgggattacaggcctgagccaccacgcccagcctcttgttctctttcaacattcagtttacttaattgtgcttcctcacgcaaaggataaccttcctcacacaaacaccctttcctgctccccttttcttccaactgttgcctgctgcctcaggaaaatctctctgtctccttcttcatggcaggagtagctgagtgggaactgccattgtatagtacctgcgacagcctggcaggtgtgaagtgctttgtctgcagtatctcatttaattctcacatgaaccctgtgtgctaatagtactcccattttataggagaggaacctaaactcagagctcagggcactttcctaggtacatgggaaatagcagaagcccaaggggagtgtgggattgtcttcaaagctcatgctttatgagtggttcttaaccccggagggctcattttttttttttttttttttttttttgagatggagtctgactgtgtcgcccaggctggactacagtggcaccatctcagctcactgtaacttcctcctcccaggttcaagcgattctcctgcctcagcctcccgagtagctgggactacaggtgcctgccaccacgcctggctaatttttgtatttttagtagagactgggttttgccatgttggccaggctggtctcaaaactcctgacctgaagtgatcctcttgccttagcctcccaaagtgctgggattacaggcatgagccatcatgcttggccaagcctggagaactcttttaaaagtaccaatgctggctgggcacggtggctaatgcctgtaatcccagcactttgggaggtcgaggtgggcagattgcttgagcccaggagttccagaccagtttgggcagcatagtgagacccctgtctctacaaaaaatttaaaaaaaaattagctgagcatggtggtgcatgcctgtggtcctagctactcaggtagctgagatgggaggcagtgagctgtgatcatgccactgcattccagcctgggcaacactgtgaaaccgtgtctcaaaaaaaaaaaaaaaaagaaagaaaagaaaagaaaaaagaaaaggtaccaatgcttgccctccttctccaaatttttttttttttttgacagagtctcacactgtcgccctgtcgccaggctggagtgagtggcgcaatctcggctcactgcaacctccgcctcctgggttcaagtgtttctc[140 bp omitted]tacagactgaactgcattcccccaaaatttatatgtcgaagccttaatcccaaatgtgactgtatttagagataaggcctttaaggaggtaattgagattaaataagcctgaccaacatggagaaacctcatctctactaaaaatacaaaaattagccaggcgtggtggtgcacacctgtaatcccagctactcgggaggctgaggcaggagaatcgcttgaacccaggaggcagaggttgcagtgagccgagattgtgacactgcactccagcctgggcaacaagagtgaaactccatctcaaaagaaaaaaaataaataaataataaaaataaaataaaaagaattcatgtgttagatgattttagggcagttggccagtcacacaagctgaaggctgggctgaaacaaaataatatgtgaatgttgggtgcaattgttttgagtagagactaaaggggcagaactgttctttgttctctgagaaggctgaaatgtccactgcattgcataatttaacacctagtccttgtcaagagaagggaattcccttgattttgaaaagtcctaatacaatcatttatatccgtctccgcacagcccagcccctctgggttcagcccgtctcctgtcattcttacaacccacatcccatattaagcagtgattattaggatgatgggagatgtcacctgcttacccagtttggacatgtttgtccatctctgctggtaatgctgcttttacccttgtgggatctggtgactttcaacaattgcccattagtgctggaaatgggcccagattcttccaacattttggcaccaaagacactgccaagaacaatctcaacttccttgggtccagcactgttaggtcaaattacatgctcaatcacaagtggagaagagtctagttttgagcatcggttgagtacaactttacaaaattgctgattcaggggtggccctatggaaaaataaggaaatgccaaatagagtttaaaaggtatgtctaatgagacaagaaagatgaggagaagcagaaacccagatggatttgaaatatctgcaggcttgtcatggtgactcctgcctgtaatcttggaattttgggaggcagaggcaggaggattgcttgagcccaggagtttgagatcagtttgggcaacacagggagactccacctctacaaaaaatgcaaaaaattagcggagcattgtggcacacacctatagctccagctactcaggaggctgaagcgggaggatcacttgagcctgggagttggaggctgcagtgagcccacatcacagcactgtactgcagcctgggcaacagtgtgagattccgtttcaaaaataaaaataaaagaaatatctgcaaacatctgctccttacactggttgcacacatacttcacctcaattccatttgaaagtctcccctattttaagttttctaatatccacagtcaagatcaaccagtctcataagtcagtcatctagtttctgcattttggatctctgaccttcagatattatatagaaattgtggactctagtgtcagccattgtttctcatctaatcctataaaaaagttgaattcaaataactattgaggctgggcgtggtggctcacgtctgtaatcccagtgctttgggaggccgaggcaggtggattgactgagctcaggagttcgagaccagcctgggcaacacggtgaaaccccgtctctactaaaatacaaaaaattagctgggcgtggcggcatgagcctgtagtcctagttactcaggagactgaggcaggagaattgcttgaacccgggaggcggaggttgcagtgagctaagattgcgccgctgtactccagtctggaaaagagcaagactccatctctaaaaaaaaaaaaaaagaaaaaaagaaagaaaaaaaaattgtggactctagtgtcagtcagtgtttttcatccaatcctacacagaagttgaattcaaataactattgaggccgggggtgggggctggctcacgcctgtaatcccagaactttgggaggttgaggtgggcaaataacttaaggtcaggagttaaaggccagcctggccaacatggtgaaatcttgtctctactaaaaatacaaaaattagctgggcatggtggtgcacgcctgtaatctcagttacttgggtggctgaggcaggagaattacttgaacccgggaggtggaggctgcagtgagccaagatcacaccactgtactctagcctgggcaacagagtgagactctgtctcaaagaaaagccgggtgtggtggctcacacctgtaatcccagcactttgggaggctgaggcaggtggatcacctgaggtcagaagtttgagaccagcctggccaacatggtgaaaccctgtctctactaaaaatacaaaaattagttaggtgtggtggtgggcgcctgtaatcccagctatttgggaggctgaggcaggaaaatcgcttgaacccgggaggcagaggttgcagtgagctgagatcatgccactgcattccagcctgggcgacagagcgagacttggtctaaaaacagaataaaacaaaacaaaaaaccaaccaagaaaacctattgatctaatgtgatgtgaggggctctgaaaagtcagctggctactttgctctttttaccacttttaccctgtgcctaaaattcctgccattagacttctgtgttaaggtactgtttcttgaaggtcactgttaaaattcgaggtaatctcagaagactttccatataaggatttttttttttttcgagatggagtttagctcttgttgcccaggctggagtgcaatggtgtgatcttggctcactgcaacctctgcctcccagattcaagtgattctcctgccttagcctcccaagtagctgggattacaggcctgtgccaccacacccggctattttttgtattttttgcaaagacgggatttagcagagatgggatttcattacgttggccaggctggtgctgaactcctgacctcaagtgatccacccgccttggcctcccaaaatgttgggtggcatgagccactgccccggccccatgtaagcatttgtcagtcaacctgtacagaccatctctggtcagttctgtgccacaggtgcaatgcctaagggtggagaactgagtgaggagatggaaaatactcttataatggctgggcatggtggcttacgcctgtaatttcagcactttgggaagctgag[132 bp omitted]gaggcagaattgttgaacccaggaggtagaggttacagtgagccgaaatcacgccactgcagtccagcttaggcaacagagcaagactctgtctcaaaaaaattaaaaaaaaaaggaaaaacaaatattctcacaagacaacgcaagctacaacaagtcaacttaactcaaatgctaagagtcaggaagggcagtggaggagtggttggagtgagaagagaggactcaagatggctttgtgcgtgtgcttgtttcgaatgaggtcttaaagtaactcaagtattgaagccagctaagtaacccaaacgccatcattgtacagggttttattttggtagaagggggatgctttatgcacacataaggcaaatgtggatttgctgaatgttagatttgaagtttcctgttttgaccattagctgactatgagaaagatttcatcataaagaagggatcttgttggaagactgagtagtttatgaaaaatttttttggctgggtgtggtggctcacagtaatcctgttactttggagggctgagacaggaagatgacttgaggccaggagtttgagaccagcctgggcatcatggtgaggcctgtctttttttaaaaaaatgataaattaaattaattttaaaaaatttaattggacacatcttgaccattagctgaataatggtcaaaacagtagcaaggctgggtgcggtggctcacacctgtaatcccagcactatgggaggctgaggcaggtggatcacatgaggtcaagagttcaagaccagcctggccaacatggcaaacctcatctctcctaaaaaaaataaataaataattagccgggcatggtggcaggcacctgtgatcctaggtacttgaaaggctgaggcaggagaatcccttgaacctgggaggcagaggttacagtgagctgagatcatgccattgcactctagcctgggcaacaagagtgaaactccgcctcaaaacaaacaaacaaacaaacaaaaacctccaaaacaaaaacagtagcaaaacaggcctgggaatcttcagggtcccataaaggagcagaggcagattgtgtgttaagtgggactttaggaaggctatcaggttgtagtgagaagagcctgatgagaaatcggcagatataggtgcaaatcctgacctcttcccttcttcttcttttttttttttttttgagacggagttttgctcttgttgccccgcatggagtgcaatggcgcaatctcagctcactgcaacctctgcctcctgggttaaagcgattctcttgccccagccttccaagtagctgggattacaagcatgcgccaccacacccagctaattttgtattttcagtagagacggggtttctccatgttggtcaggctggtcttgaactcctgacctcaggtgatccacctgccttggcctcccaaagtgctgggattacaggtgtgaaccaccacgcccagcctcgatctgagtaaactttgacatgtcactaaacttctggcctcccttgcctgcaaataccttatctacagttgccatagacagtctaagcttcaagggactctgaccatagttaacacatatgagaggattttgtaaactatgttgggtacatataaagtttggattttttttgttattgttgttttaaaccaaactcaaagcctatattttgctcacctgtgtgagatctatacctcaagatttcttatatggcattaaaatagtgaaatcaaaaaccatggtttgaatgactcactactgcagatggtagagtgagtttgaatgagggaggaaggccatgatcccgagatttgtccggagagagaatctgtggctgttggcaacagaattaagccccagaaacaaagggaccctttatttgagagaggtcctgaggtatcatcacagttatggtttgtagtcgcagtgggaacaaggatagcattgtgggcaggtgtgtggcctaatggaaaacaacagtatgaagagtgagtaactggggtatggaggatggcgtcagcccaaggacaaaggtgcatcactgagaaggaatcttgttggaggactgagtagttccctgaagatgtttttatttttatttttattttttttttgagacagagtctcattttgtcacccaggctggagtatagtggtgcgatcttggctcactgcaacctccacctcccgggttcaagcgattctcatacctcagcctcccaagtagctaggattataggcgtccgccatcacatctggctaacttttgtatttttatagagacgggggtttcaccatgttggccaggctggtctcgaactcctgacctcaggtgatctgcctgccttggcctcccaaagtatcgggattacaggcatgagccaccggcctgaagatgtttttgatgagccacatcttgagctgggaaaataacaccatgaaagcagagttagagccaatcgatctaacaattgtggtcaattgattggtaacaaaggtgccaagaacacacagtgagaaaaaaacagtctctttatttttatttttgacagtctctttaataaatggtgttaggaaaactggctatccacatgccgaagaatgaaattagagccttatctcgcaccatacccaaaaatcaactcaaagtggaataaagactcaaatgtaagacctgaaactataaagctactcaggaggctgaggcaggagaattgcttgaacctgggaggcggaggttgcagtgagccgagatggcaccaatgcactccagcctgggcgacaagagcgtgactctgtctcaaaaagaaaaaaaaaagtaaagtaaagtaaatgtgaagaaataggagttgttccggcagtcttatgcttttctggtcacactgggagcttatgtgtccctatgatgtgggagaccctgggacttgattttcttcctattttctcagaaaagagcctcagaaatattcacataggactgccttgaccctgcgatggcaaataacgtcactcatgtgcaaattcagacaaatagtagcagctgcctggaatactgtgctgtgtggggctctaaggcacatttggggatctgagaagtggacaagaacattattacacgtggctcagtgatgtcttgcccgtggtggcaatcctgccgattattttgctgaccttgttaagactccagattcctggtgatgagcctcatatgctgggatgcagctttcttctcctttgtcctctgattactttttccctataccctctgctgttgtctagtttcagtgccacaccacgcccccaacctcaactttccgctcaccttctcaaagcccagtactgacccctcctctaagccagccttttcttctctgtcttccctctcatggtggtttttgggaggctgaggtttctgggtggtgctgcatttctcccactgtgaaacggacggtggtttcacctaagacagacatggaccttacaggaccccaacgcacctcttaggcttaaagaacttgcccaagaaggatctgtcatccaagcacagtaaaaacgtgatcttgctgggtcaggttcagaattggttgctctggcctccttgatacagatgttcctcaacttataatggggttacatcctgatcaacctatcgtaaggtgaacattttgtaagttgaaaatgcattcaggccgggtgcagtggctcatgtctataatcctagcactttggggggcccaggcaggtggatcacctgaggtcaggagttcgagaccaccctggccaacacggcaaaacctcgtctctactaaaaatacaaatattacaggtggcgagtgcctgtaaccccagctacttgggaggctgaggcaggagaatggcttgaatccgggaggcggaggttgcagtgagcttagatcatgctactgcactccagcctgggtgacacagcaggactccatctcaaaaaaaaaaaaaaaaagaaaagaaaagaaaaaaagaaacagggtttcatcatgttggccaggctggtctcaaactcctgacctcaggtgatctgcccacctcggcctcccaaagtgctgggattatgggcgtgagcccccgcccccggcctatacttcaaattctgaattttgatctctttccaggcgtggtggcatgtgcctgtaattccagttactcaggaggctgaggcaggagaagtgcttgaacccgggaggtggaggttgc[132 bp omitted]caaaaacttgcaagttgaagcattgttaagttggggaccatctgtataattgttaactccagagtaggaagttgctcctttgctctacttccttacatcttcacagctggaggtgtaagggggaacaccaaggatgtaactgaaccttgattcagcttcagccagtcacgttactgtgcagaggtgagatatgaatatttttgtccatcaagtttccactgaacagaggcccagcaccaccagtgcctcctgcagaactctcaaagacatgtgacatggtcctggacctcaaggacagctgtgtgtctgtaggaaatagttaaatcacatgaggcaagattcgtctgtgtcacattgagtgagactttgggtatgtaggatgttctgtgaggttggcctagttaaaagaagaaaggcaggagtaaggaagcagctggcagtgataagaagcggagcccgggcgcagtggctcatgcctgtaatcccaacactttgggaggccgaggtaggtggatcacttgaggtgaagagttcgagaccagcttgtccaacacggcgaaaccctgtctctactgaaaatacaaaaattagccaggagtggtggtgcatgtctgtaatcccaactacttgggaggctgaagcaggagaatcgcttgaacccagcaggcggaggttgcagtgagccaagattgcaccattgcactccagcctgggcgacaagagtgaagctctgtctcaaaaataaaataaaataaaataataaaataataaaataaaaatgtaagaaaggagtgcagccagtgcctgtagccctccttctcacatattctacagatagaagagaagggacaagggtgaaatagtgcagtgtgtctttggtttctccatgtgtttgtctctgtgtgaattcaggagggtggtcagtgttcctatctacctttttttttttttttaagaggaacagaactgctcatactcacctataaagccaattctgtggaagtcctgaacctgttagtagaccgtgaaacatcagcccctgcccagtcatacacatcctcatacaggctgaaagtgggaacagtatttacaaaccatatgtccttgtctccttcactcagtagattcctattactccaggtggcacctaggttggctagtgtaataaagcagacggtgggccaggcgtggtagctcacggctgtaatcccagcactttgggaggccgaggtgggcggatcacctgagctcaggagttccagacaagcctgactaacatggagaaaccctgtctctactaaaaatacaaaaattagccgggcgtggtggcacgtggctgtattcccagctactcaggaggctgaggcaggagaatcgcttgaacctcggaggtggaggttgcggtgagccaagatcacgccattgcactccagcctgagcgacaagagcaagactccatctcaaaaaacaaaacaaaataaaataaaataaagcaaacggtgagccggggagtggctgagaggagacaacttatccttttccttcctaactcacacacaagcgcaggtcagattaagcactgccaaagctggggccaatgattctcaaactttattgtgcatcagagccatgaagtgttgttaaaacacacatttctgggccgggcttggtggctcacacctgtaatcctggcactttgggaggccgaggcaggtggatcacctgaggacaggagatcaagaccagcctggccaatacggtgaaaccccatctctactaaaagtacaaaaattagccaggtgtggtggtgcatacttataatcccagctactcgggaggctgaggcaggagaatcacttgaacccaggaggcggaggttgtggtgagctgagatggcaccactgcaccccagcctgggcgacagagtggactccatctcaaaaaacaacagccaccaaaccaaacaaaacaaaacaaaaaagccacaacacatttctgagctccaactccagagtttctgatttagaagatctgtgggtggggcctaagaattttcatttctaacaagtccccaggtgatgctaatgctgctggtttagagaccacactttgagaaccattggcctatgctattggttttcaaccatggctgtaggtcagaattacctggaaagttaaaagcaaaacaatccacgtccagatcttttttcagatcaatttcaacagagtctatgtgggaggcaccagacagccatgattttagaccccaggtgattccaatgtgcagtcaagtgtaggggtgggttgcccctccacacctgtgggtgtttctcgtaaggtggaacgagagacttaggaaagaaaaagacacagagacaaagtatagagaaagaaataaggggacccagggaaccagcgttcagcatatggaggatcccgccagcctctgagttcccttagtatttattgatcatttgtgggtgtttctcgaagagggggatgtgtcagggtcacaagacaattgtggggagagggtcagcagacaaacacgtgaacaaaggtctttgcatcatagacaatgtaaaggattaagtgctgtgcttttagatatgcatacacataaacatctcaatgctttacaaagcagtattgctgcccgcaggtcccactccagccctaaggcagtttttccctatctcagtagatggagcatacaatcgggttttataccgagacattccattgcccagggacaggcaggagacagatgccttcctcttgtctcaactgcaagaggcattccttcctcttatactaatcctcctcagcacagaccctttacgggtgtcgggctgggggatggtcaggtctttcccttcccacgaggccatatttcagactaccacatggggagaaaccttggacaatacctggctttcctaggcagaggtccctgcggccttccgcagtttttgtgtccctgggtacttgagattagggagtggtgatgactcttaaggagcatgctgccttcaggcatctgtttaacaaagcacatcttgcaccgcccttaatccattcaactctgagttgacacagcacatgtttcagagagcacggggttgggggtaaggttatagattaacagaatctcaaggcagaagaatttttcttagtacagaacaaaatggagtctcctatgtctacttctttctacacagacacagtaacaatctgatctctcttgcttttccccacagtcaaggttgagaatcacgatttaggctcttgaggcagacacccattaatgcaggtgtactagataaagctcagtaaaaccaaatatcttccacccttggttctgcggcaggatatttttgtagtctgggcgtctttccttgggataaatgtagcttgcaatgattttgatggaaatggacttttcttggatcacggcttggagaaagttttgagcagagtgaggaaggttgcaatggcaaccgtggaaaatggtagacaagctgagtagggaaacagaaagtgatttctgggcctgtggaaagcagagaccataagattaccttaggactcttaaacaaaatatatttttcccactcaccattagccgcatgggcaaggaaaacagatttttttttttttgacatagaatctcgctctgtggcccaggctggagtgcagtggcgtgatcttggctcacggcaacctctgcctcccaggttcaagcgattctcctgcctcagcctcccgagtagctgggattacgggtgcgagccaccacatctgactaatttttgtagttttttttttttttttttgagatggagtcttactctgtcgcccaggcgagagtgcagtggcgtgatctcagctcactgtaacctccgcctcccaggttcaggtgattcttctgcctcagcctctcgagtagctgggactacaggcatgcaccaccatgcctggctaatttttgtatttttagtagagacagggtttcaccatattggccaggctggtctcgaactcctgaccttgtgatcctcccgccttcgcctcccaaagtgctgggattacaggtgtgagccaccgcacctggccctaatttttgtacttttaatagagatgggtttcaccattttggccaggctggtttcgaactcctgaccttgtgatctgtctgcctcagcctcccaaagtactgggatcacatgcatgagccaccacgcccggccggaaaatagatattctgattgaatcagagttaacaaacttcccatgcagttgcagacagtagggcaagggagttaaggattttagtaccagagtggctaaagtgatggaccctagagtctagggcctaatggcaatgatgaattcaagagaaagttttctttctgctagattgtgtgtggcatacaaacacaatattcccttctaagggtggtcactcctttccctatttcataggattatggtgaggcaaacacagaagcccgccgtcatccttgcgggaaggcaggtgaccaggcttggtaaatcacacggtcctttcccccttgattggtccatggttgagcaccagacccaaacagggctaatcatagtcctttgtaactgatatttgggaaggatagtgtactctgaggcaacattatatagaatgaaagtcttcaatgtg[224 bp omitted]gaggctggagaatcgcttgaacccgggaggtggaggttgcagtgagcagagatcgtgccattgcactccagccttggcgacaagagcgaaactccgc[133 bp omitted]aaacccgtctctacctaaaatacaaaattagccgggcgtggtggcacatgcttgtaatcccagttactcggggaggctgaagtaggagaatcgcttgaatccgggaggcggaggttgcggtgagcggagatggcgccatcgcactccagcctggacaacaagagcgaaactccatctcaaaaaacaaacaaacaagaaaacaagctggctgtgcaaaattacagaggaagtaacaaggaaaggttctgaggtgagaatgggccaagcttgctcagggaacccaggaaggctagctgcagaatgctgtttccgtggcctcggcagcttaacctaggcctttactcttaaccttggtaattcccacgcaatcttgagatttcaggccaaacgtcactcctgcaagcccttccggaactcaaagcatgtctcccttcgctcccgccgaggagagacctgttcccaggatctgcagccctgtgcttatcagacccacggagtctgtggaaaggaaggatgggataagaacgatgcgggttgggagagttaaaagggtcgcgcaaacggtccccgcgggaatgcgaagcggattctcgagttcttgagcctagagcaatgcttggggagcgacacgagggcgcagagcggcagatcgcggagcggaagttcatccccggagccgttctaggaaacccggaggactcaggtcgtcaatgattccggggctgaagtgggcatcgacgggtgcactttgctgttccagggagccggctcggcaggcggcggcgacgtggaacttgggctagggctagaaccggcgaaaagcaagccggaaaaggcaagggggcgtcggtgcgctgaccacctgttcctccagcggagtgcgacgcgcgccgattggctggagtgccgcccgggtaccggaagtggccgatgcccgtcgccagtgacaccgggacaacagctgcgggctctgtgcgagcggcccagcagcgcggagcctcagcggagtgagcgagcgcggggcagtagcggcctgcggtgagacctcattccgtcgcggctgtgggggtaggcgggggctgggctcccagctccctagagagccgagcggaaaccctacgtttaggcccgttctgaccggggttcgctgtgtgaccttgaagtttatgcctccctccattccccccgcccccaggccttcatttccacctgcacacagagagggtggggcctggacaccgccagggacagtcccagctctggtttggtgcctgtcagccgtgggggtgggagaagcagggacactcccttctgtaccgaggtggggacccgtgggagctgtggttttctcagacattccacccccaagtaaaccgctaggacgaaatggcgggcagtgtcacaaacttaacgccctagtggcagattgtgccctgtgctgccagacaagatattggcttatgaggggtggtcgtgaaaaggagacaggtttgagctgcaaagatagagccctattgtgggtcagagggagaagagaggaaaggaggttaacagtgccataaattaaatatcacccagattgggaaaaggaacttatttttacaaacagttatcgacaccagctatgtgtcagacactatcctaggctctttagatataatgatgaatgaaatatccagttagccatcaagagtattacagaggctgggtgcagtggctcatgcctgtaatcccagcattttgggaggcctaggcgggaggatcacttgagcacaggagttcaagaccagcctgggcaacatagtgagacaccatctgtacaaaaaacaaagaaattagttgggtagttgggtgtggtggcgcatgcttgtagtcccagctacttgggaggctgaggtgggaggattttcttgagcctgggaagttgaagctgcagtgagtctgggcaatagagccaagaccctgtctcagaaaaaagggaggtattgcagattcattatatatataagacagttacacaaattcacttaacatttaccaggtatctgaaatatgctaggtactcagaataccaggatgaatggaacagcatccttgcttatggtctagagaagaaaataggtatgaaaaattaataatgcagtggggtagctgctacaaggtgaaggagtagctgtctgccttagagcctgggggtcagggaagaaaatggagggggtcagctgggcgtgatggctcatgcctgtaatcccagcactttgggaggcaaaggtgggcggatcacctgaggtcaggagctcgagaccagcctggccaacatggtgaaaccctgtctctactagaaatacaaaattagccaggcgtggtggcagatgcctgtaataccagctgcttgggaggctgaggtgggagaatcgcctgagcctgggaggcggaggttgcggtgagccaagattgcgccattgcactccagcctgggagacagagcgaggctccatctccaaagaaaaaaaaaaaaataggtatcgtggtttcaggactgattaatccagtggccctggcagcatctcccttgtttttctgagctttagctgccctcatccacaggctggtagtgagatggcagcagcaggtacaggcaataatatatggaagtattttcctatggttctctcaggatggcaggaaactattcccagaagctcccagcaaacgtcctcaaaatattgacccagatgaaggtggatgtccatttccaaaccaggaattcccgaatccttgctgtttctgaaccagtgccttgcaagaattagggcatttatttgactgggttaactcagttggagtgtcctgctggagctcttggatgaggttagatctctggcaaggaaagcaaagccactgcaaatatttttgctcacataccccgtaaaataattttggaaggtttgtgtctctttatacatttgcaagttgacatccaaaacatttccatttctcatcataaattttaatgagtttcaaaggatattatttttgaggtattaaaatttcgacatttcaaaataaaacctcatcccagtttcccagataccttcccttggttaccttcccttggagcacaaagaaggtgctcatcacatccttcaccctctctgtaacctccatctcttagcaccccactcctcccagccccccttcatttccatccgtatctcacttagtcatctcagctctgtcctgactaacctccctaggcctcgcctcctcagtcttccaccacacatctccctggattctcaggctgccaaaactgccactgaaagaagtcaggagagcatggtgattggcccctcttcactctgatgctctccagcttgcttgtttcatgaggtggtggtaagggttaatgtctgtaagttgcttagcacatggtgagagcttatcattagcctccacatcaaaatgtcagtgctgcctggctcatctcccctccatatttatcccaccccgtgcatgctacattgaaatcccaatgttttttctgtttctgttctttttttttttttttcttttttgagatggagtctcactctgcactggagtgcagtggcacaattttggctcactgcaagctcggcctgccccgggcttcacaccattctcctgcctcagcctcccgagtagctgggactacaggtgccttccaccacacctggctaatttttgtatttttactagaggtggggtttcaccgtgttagccgtgatgtctgtttcttttcttactcctcctgtacttcctggcctcttgcttgcccactttctgtccggaatgctatagtgcagtggtcttcagatggaaatatgtggagggggtacacagacactttctgtaacatctttgggcacatagattgttgaatggaaatcaacttctagatccttgactttattttgtatccttgcctatgagtgatctgcttaagaatgggcctgtggcctgtaggtttctcttctctcacattttttcacaattgttcttttcttcattttattttattttattttattttattttttg[135 bp omitted]cacgc[142 bp omitted]tttcttcttttataaaagaaagacaccggccaggcatggtggctcacgcctgtaatcctagcacttttggaggccgaggtgggtggatcatttgaggtcaggagtttgagaccagcctggccaacatg[180 bp omitted]gtggtgggcgtgtgtaatcccagctactagggaggctgaggcaggagaatcgcttgaaaccaggaggcagaggttgcagtgagccaagatcacgccactgcactccagcctgggcgacagagtgagactccgtctcaaaaaaataataagtaaaataaaataaataaagacaccactcacgcatctccttaaggttaccatggtgcatccctctgcagtggaaaatcctctagcgtgccatacagagacaatttgttgaagaagtgagttttttggacgttttgtaatacaagtcccaatctttgctcccaacaaaattttacttaattttttgagacagggtctcttattctgtcacccaggctggagtgcagtggtgtgatcatagctcactgcatccttcacctgccagcctcaggtgatcctcccacctcagctgcccaggtagcttgggattataggcattcaccaccgtggctggctaatttttttgtaatttttctagagacaggtttcgccctgttggccaggctggtctcaaactcctgggcttaagtgatgtacccaccttagcctctcaaagtgccgggattataggcgtgcccagtcccaacagaatttttaaaagatgtaatcaggttgtcagtcagctgccagattatgccgtaatgttttactacaaatcactgtgtggctttttggcagataagttcaaaaagttgtgatattgctacaagagattgctgtaaatgcaggttgatgcagtttgggcaaaatcaggtccagttacagtaactagagtcagtttgttaagcataagagaaaggtggtttttaactcagaagaggtatgcagtcagttgtattatatctgtctgctgtcaggtttaggggaggggaggggcaatctagattgagaagaggaaaaaagtcagagcaggaactggcaatgtacccataattctgctgctcgacacctgtgttgatctgcctgtaggccaggttttgggtaaagatggatacaccacattaagagtaggataactccagtcattaagactttgtaggccgggcgcagtggctcatgcttgtaatcccagcactttgggacgccgaggtggatggatcacctgaggtcaggagttggagaccagcctaaccaacacggagaaaccccatctctactaaaaatacaaaattagccaggcacggtggtgcaagcctgtaatcccagctacttgggaggctgaggcaggagaattgcttgaacccggaaggtggagccaggattgcaccactgcactccagctggggaacaagagtgaaactctatctcaaaaaaaaaaaaaaagactttgtaacagtggttttcaaacctggctgggcatcagaatcacctagggtacttgtttaaaatatagatctcttggtcccactagagattctgattctgagagatctgagatgggacctggacattagtatttttaacagatttctcagtggattctcacgcagctagcctagttccaggccaggaaccattgtttaagagacattcatctaacaagatcttcctgccatgatttcagggctcctaagcaattttcagggttttatgtggctttccatgcagattttcttttcttttcttttcttttcttttcttttttttgagatggagtctggctctgtcgcccaggctggagtgcaatggtgcgatctcagctcactgcaacctccacctcccaggttcaactgattctcctgcctcagcctcccgagtagctgggattataagcacccaccatcatgcccagccaatttttgtatttttgtagagatgaggtttc[133 bp omitted]ctttataaattttatttcttgttgttaattaatagatatctggtttatacatca[138 bp omitted]gcctc[224 bp omitted]aagacaaatttaggtctgccaagttgagggtcctattctgagctgtggaaacccaatagaggtctgcctgtcatgcccaaactgaggaccagtggtcaacctctactcttccagtagcacctccatcttatctctcttcagaaacatttaatttcagatttaggaaagtgaggaagtgagaaacggaaagatagaaaattgtatttgggaatttgaatttaggctatgagaagtggtgtttccatatgagtctgaggcctaatatatggctgtgcctctggaagaatcaaccaaatggagattggctttgatttgtatttgagaagatacccatagagcagtatttgacaaatgacatactgtgttgctggcagaatgcaaagtaaaagaatgatcagagtgggtaagatttagtgggggaaggctttctgtgttttttttgagatggaatcttactctgttgcacaggctggagtgcagtggagtgatcttggctcactacaacttgtgcctcctgggctcaagcgattctcctgcctcagcctccccagtaactgggactacaggtgcacaccaccatgcctggctaattttttgtgtgttttttttagtagagacagggtttcaccatgttgtccaggctggtctcgaactcctgacctcaggtggttctgcctgcctcagcctctcaaagtgctgggattacaggcatgagccaccgtgcctggccagg[132 bp omitted]catcagcctcctgagtagctgggactacaagcgcccgccaccacgcccagctaattttttgtatttttagtagagatggagtttcactgtgttagccaggatggtcttgatctcctgacctcgtgatctgcccacctcggccttccaaagtgctgggattataggtgtgagccaccacacccggccctgaatttgagttttaaactaggtcctggttacttgactggggataaatacatacctaacttctgtcgtatcttgttttgctaagaaaaagtgattttccatttatcgtggtacacgtgtcagctctacgaatgctgattttgtaaagaactagatgatggaaaataagcaagtataggaggcatgaggatgaaaaggaaaggccagagagggggttggaagcagatggagactgaaatggcagcttgtggaacttgctcttgggtagggatgagagagaaatgtatttaagacagtacttcccaactcagatggtaccatggaggaagaagatagctaaattctcgacaatggattcttacaattgtatagatacacattacctataattttcaaagatttcaacaaaaaggagaagtacagtttttaggtgccctctcttacttcatgggaaaatgagagaagatgctgagatggggaaggtcaaagaaagttccacctcattttcaggtgtagcacaaagagcttctaagacttcaggattccagtaggagatcaggttccttccaggtgtctggggaggggggcattaccaggctgccctgatgagtgactagaggtgcccgagccggatggtgttagtaaccaacatcctgtggataacgggaggctgggcagagagaaggggagtccaaagtcgcccccaaatctccacctttccccttcccttaccacatgactccagcctcctctgctgctcagggtctttgtttcttcagtaatctcatcctttcttcactcttaacccctgtctctctgctggacctattccttctaatataaacatgttcatatctcttccatcagaggaaagccttgctctatagcactgtccgtcttggtcttctcctttcatccacttttttttttttttttaaagaagcagcaaattcattattcagtccactaccagctggcttttgctactgtcattcccctgaatctgtgctcacagttcatatgtgactatctattgtctcagtacacattttctttctttttttttttttttttttttgagacggagtctcgctctgtcacccaggctggagtgcagaggtgtgatcttggctcactgcaagctccgcctcccgggttcaggccattctcctgcctcagcttcccgagtagctgggactacaggcgcccgccaccacgcctggctcctttttttgtacttttagtagagacggagtttcaccgtgttagccaagatggtctcgatctcctgacctcatgatctgcctgccttggcctcccaaagtgctgggataacaggcgtgagccactgtgcccagcc[134 bp omitted]cctctacctcacaggctcaagtgatcctcccacctcagcttcccgagtagctggaactacaggcacatgccactatgcctggctaaatttttaatttgtagagatggggtcttgctatgtttcccaggctggtctcaaactcctgggctcaagtgatcctcccacctactcctcccaaagtgctggcattaaaggcgtgagccaccgttcctagccttcactcgatatttttaaattccctctgccaatgcctaagtgacttctgtgacacattattctggtttttcagtttccctaccattctttatcttcttggctcattctcttcctctactcacccctttatgaacggagtctgaacaggaaacagctcactcaaattaggataatttgaggagggtttatttgcagcgaggttaattataaatgatctaggtgtgggcaggtcattgaagaacccagggctggcaataatagtcactagccctgggcctgaagagagaggagggagtagaggttactggaacccagacagtgagactactgagtaggatagagttgagaggagtagggacctcagttgagggacaacaccaacccaaggcgacctcacaggaaggaaccctgacccctttctcctgccctgccctttcgtccctgcttccagacccctgctggggctcctcattggtggaccacagctggaagccagaggctctgttgatgtgttccatacaggttaggtttctggggcaaagagggacagggagaaaggtggaaagaagatctagagggaaaatggaagataactggagcactcgtgactgtttctttgactcctaggcttctgttcgcagcctctgatggttctcatgctacactcaggctgagtactttcaagtctgtatctctagtcctgactactttgagctttagaccaatatattttgactgattctttgatacctctctgtggataccttgaaactcattttgtccaaaacagagctcactgatcatcttttattgctatattagctcctctcccagtattcagaatattgtggcaccaccgtccatctaattaccatccctcaaattgagtgagatctgggcaccatctttgagtcctccctccttacacctatctccagtcacacaccaagtcttgcagaatttgacctcttccgtatttccccagcctgtctcttcctccccactgctactagtgctctagtgagatcacatcaccttttgccttgatgactgcagcagcctcccagctgatcttcctatgtgcaggcctactgctttctttttttttttttttttttagtagagatggggtttcaccgtgtgagccaggatggtctcagtctcctgatctcgtgatcctcccgcctt[134 bp omitted]ggcctcccaaagtgctggaattacaggcgtgagccaccacgcccggccaggcccactgctttctacttcagccactaaacgaccacgagtgtgcatctgcgtggaatgctaatctgactagggaccatgtcattccttggtttaaaaaaccatcccatagttctgcaatgtctaaaggatgaagttccatacattcccatgcccccttgagaatcaccttccacagtgaacactttcactgacgggaggattgtattcctcagatttgccgtagtgcacaaatagactgccctaagcaaaggccactttaatattagttccagattgcttaccatctgaacaaaggtcaggcttattctcctggcatttggaccccttgtctgtggtggggacagccaaatccccaggacagttttattaggaataggtttggcctcgtataataataaaaaacccccaatatcttaagcaaggcaaaagcttatttctctcttagataaatgaagtccagaggctggcattccaggattggtatggcagtaccatggagtcatcagggtcccaggttccttccagctgtgatccccagtcctaggctatgccagtatactcatggtccaggatggtgtccagctatcacatcatgctctgggaacagcatggaagacaagatggaagaaatgtatctcctcatcctttaggagatttcctagtagtcccatgtggtttcatttgcatctcactgtctcattggctagaatatgatcatgtggccaatcccaactgcaaaaattaaaaagctggggaatgtatttttttagctaggctaattgccacactatataaatttattattctgttataaggcaatggggaataatattggggtaggcaactaaacatttttgccacaactaaaaatctttgtaaaagttttaaaaaggtactctcctcccacccacccctgcccaagaaacaaggtgtcttgctctattacccaggctggagtacagtggcacaatcacggctcattgcagccttgaccccctgggctcaagtgaccctcctacctcagcctccccagtagctgagactacagacacatgccactgcccctggccaatttttaaaaaattttagttgagacaagatctccctatgttacctaggctggtcttgaactcctgagctcaagccatcttcccacctctgcctcccaaagtactggaattacaggtgtgagccaccacaccctgccaaaaatgcactctttaagtaatctatgaaggtattaagaaaatactataagagagctgattacaaaattaatatgtaatgatcaacagcattgctatatatataagtaatagccagttacaaaatgtaagaaaatctcactaaatgaaaagaggtacagagacatgatgaacataaaaacaacatcagcataagtttggactacaaatttatactaaagtttacttgggaagatatgagaatagacaggaaaggtctgaaaaagaaaactgagataactttctctagcatatattaaaaatgttaataaagctaacaggttgaactgtttgatattagagaagacaaggatcagtggaactgaatagaatccagaagttggcccaaatatagatggatatttagactatggcataggtggcattttaaatcagtaggggaaagaattattcagtaaatggtattgacacaattcagtagccctttggagaagtttaaagccagtggctccaaatgtcagggagccaaaggcggtacttctgtgctagttatagctaagacacattaatcttttgaagaggtaagccctctatgtcccctctcctgctctatagagctgatgagtaccagagaacaggactaagaatagtcctcttgttactcattttgcagttacttcccctgtacacccaaaagttatttatattaacttgtcctttttttttcttttttgagacagggtctgactctgtcacccagcctggagtgcagtggtgcagtctccacttattgcaacctccgcctccctggttcaagcaattgtcctgcctcagccccccaagaagctgggactacaggtgtacgccaccatgcccagctagtttttgtatttttagtagacagggt[134 bp omitted]cctatctattaatatggccaccattttccctagatgttttctttaatcaccttcaggttctaacccaactcaccgttaatattatggattttttttttatcagcatctctttaccatccatttcctacttctctcttgaaatcttttctcactcctgtcagcatccactgtttagcatgtccaccataatcctaaatctggatcttctctttggcagcatcttgtcatttcgccagatatcaagactgtttctgttttgtttttttgttttgagagggtctcgccctgtcacccaggctgaagtgcagtggcgcatttcagctcactgcagccttgacctccccaggctcaagcaatcctcctgcctcagctgccctcctcccctgaccaagactgtttctgagtgctatgagaactacatcaaagctctgttgtcctctagtgttagcttcatttaaatatgatacggtcccttcacatacttacctctctcatttcagattgtgagatggggactgagaacaaggaggtgattcccaaggaagaaatttctgaagaatctgagccacatgggtcattattagaaaaatttccaaaagtggtttaccaaggtcatgagtttggagcaggatgtgaagaagacatgttggagggacattcgagagagtccatggaagaggttatagagcagatgtctcctcaggagagagactttccatcagggttgatgatctttaagaaatcaccctcaagtgagaaagaccgggagaataatgagagtgagagaggctgcagtcccagcccaaatctggttacacatcagggagatacaacagagggagttagtgcatttgctacctctggccaaaacttcctagagattttagaatctaacaaaacacagagaagttctgtgggagaaaagcctcatacatgtaaagaatgtgggaaagcctttaatcagaactcacatctcatccagcatatgagagttcatagtggagaaaaaccctttgaatgtaaagaatgtggaaagacatttggaactaattcaagccttcgacggcacctgagaattcatgctggagaaaaaccctttgcttgtaatgaatgtggaaaggccttcattcagagttcacaccttattcaccatcatagaattcatactggagagagaccctataaatgtgaagaatgtggtaaagccttcagtcaaaattcagcccttattctacaccagagaatccatactggagagaaaccatatgaatgtaatgaatgtgggaagacctttagggttagttcacagcttattcagcatcagagaattcatactgaagaaagataccatgaatgcaatgagtgtggcaaagccttcaagcatagctcaggccttattagacaccagaaaattcatactggagaaaaaccatatctgtgtaatgaatgtgggaagggcttcgggcagagttctgagcttatccggcatcagagaattcatacaggggacaaaccctatgaatgtaatgaatgtgggaaaacttttggccagaactcagagattattagacatattagaattcatactggtgagaagccctatgtatgtaaggaatgtgggaaggccttcagggggaactcagaacttcttagacatgagagaattcacactggagagaaaccctatgaatgctttgagtgtggaaaggctttcaggcggacctctcaccttattgtccaccagagaattcatactggagagaaaccccatcaatgtaatgagtgtgcaagaaccttttgggataattctgagctgcttctccaccagaaaattcatattggagagaaaccttatgaatgtagcgagtgtgagaaaacatttagccagcattcccaacttatcatacatcagagaattcacactggagagaagccttatgagtgccaagaatgtcagaagacttttagtcggagctctcacctcctccgacatcaaagtgttcactgtatggagtaatctgcaaaataggaaagcttttagtggaaaagctaaagtccaacttattcatttgttcataatatgcaaatatgcaccccaagtattcaaatccaatgaatggacagaacctcctctgtcctcccactgattttaaatagttggttgaagaagatgaggcacttttttttttttttttttaagcattggggtcttgctctgttgcccaggatgggatgcagtggcacagtcgtaactcactgcttccttgaactcctgggctcaaacagtcctcctgcctcagccttccaaatagctaggactgcaggcactaatgaggcacttttatgaattattcattgagaggtttcagtgtgctaagttaaatcataaaagctctttcaggccttaatttcccctctgtccttccttccccttctcctcccccagtggatcacataacaaacattaagggtctgtaccagccatctttcctaaattactcttcagcaaaattgtgggaacaggattccaccacctcctaagaatgagagttgactcattgactgttaccccctgaaatattagaaagtcataatttagaagacacacctcattctcctgtccactgtttagcattggaataatttagtaagctgttattagcttcaaagtcgtccagccctgctatgaagttactttagaagatggcagcattaatgaagaagcaggctcatttcacatctgtcaggcttccttattcatctgaagaggctgccatgatggaggaactgacaggcaatttacaacgggattataagtgaaggccttagaatccagaggggccgattaggcaacaccaggggataaacaattgaggtcacactgctcggcatgggcagaagcagctcttcaggagctgtccacacttcaggggtgctcagactgactgctcctaagaattctgctgcatatatttttagccccatctcctgccactgctgacagatattgtgacagtaagtagcagacaggactgtggcttcacctcctccgggcacctggctacagtgatgagtcagttcacctgatgacaaaccagggtctggccttgccaaagcacttaagttctcatgacctggaccgcactggaggccctggctaagtcaggatgtcgtagcctcttcttggttttgccccttggccttgaaattcttttttcttgaataactttaaaaaaatagagataaagtcttgctatgttgcccaggctggtcttgaatgcctgggctccagcaatctttttgcctcaacttcccaaagtattgagattacaggtgtgagctaccatgcccggccttgaaattctttcttcgctatgtctgcatgttttttgtgttctgtatttatttcttctccaaggaaacagcctacattttccatgtgtccatgtttctgaggccgtgggtgacagtgggaattgcactaatgggggcccaacaggcctgggggctggtcttagcgctagaccttgaacaaggcacttcacctgctggtctccaattttctcctctgtaaaatgaaagagttgaactaagtgatctcaaaagtttcaaccagcccgataattccttaattctttaaaaatttaactttatatatctttattattctttaacctcatctttgttacactaatattagtcactaatatttattgagtgtttactacctgacaggcagagtgccagtttacattttaattttcacatcatttctatgatgtgggtactcatttttttaaagctttatgaaggtataatttacgtactataaaattcacctgttttaagtgttcagttgaatgatttttaatttacatagtggtgcaaccatcaatgatgtgggtattcttaccccaatttaaaagataagaaggggcagtgttaagtaattgacccatgattccacagctagtaagagcgacagccaagactccaaacctggttgatgctcttaaccactgtgctatgccgcaggtaggcagattcattactgccttatctgaaaccctttgcacagtttctattactgatttctatgtagatttgaatataacaaatttaaatcatgtccttggtaacagaactgatcacagccaaaaaaaattcaccaaatgggtttattctgtactccaatataggtgtcttcccaggtttatatccttggcttgagaaaagggttgtacaaatagatgattgcagagtttccacatccttccagatacctctgcctctagcagtcacactcttagtaagggaagttgtttgatttacttcttcccttaggttgattacaagtgaagtgcgccgtcttattcctttttcattgctggagcacaaattgaattgtgcccagaccgtatctttctcacatgaaacctggatctcacctatcccttccatgcctgattcccgtgtttgcatattttatttccacatttacctcttgtcagccctgacagagaatttggcaccccttcaagcttctcctaaacaatctatgcacacaaacacccctgagcaatatggacttcactgaagatagtgtgtaagcaaaggagaagagttcacattgtgcatcctattagacattttgttctcagaagtaccttactggccaaaccaatgaaggttttcctcttgtcctcccctctcaaggctcagtcacctcaacttctttttgcctactagatatccaatccatcacctcgcctcccctggccctagctcaattaccctcttaaacccattcctgctcagcaaaacttcctctagttcaccattcattcatttgaacattaggaggcaatttagtgacctgttgtacctgaccatgttcttaagggggaggtctcacgtctcattcccagaaaagtctaccatatatagatacatattccccgccccgccccagatttctggtgaatgaaatcacttgtatcttattaggtacatatacgcaaatccttaacctcaattctctgtcctcttcatgtcttacccagatatctcaggaagatttctcttttccttctgtttgcctccctcttcgacttacttgggagtcagcatctgaccacagtcgtgactggtaatgatgatttgtgcaaatactatcaaggaaaggacatgaattgtcttaattttagacccattaaaaaaccgcacaggcctcaatcttaaaagtcctatctaaatacccagaaatacccttcagaatttttgaagctatgcccatgtacaaaattttcttccttccctaattttaatggtatactaacaccttaggtaaataaaatatttctttactattttattgatacaatgcctttgtcatgtttattccaaattgcattatgtttcactatggatttaataaggactttgtttaccagtttcatccccaccttgtaagtttcaccttacctaaatacccccacatgcttgttagcttctggttttgcatacagtgtacattctgtgtccttgatctgctttgcttggtgagatccttcatcttaaataacaggacaagtgttatctattgtgcgtgtgttggtatacacgtttttcttcatgattagcaacttaaaatattccggaccatttgtatggcctttaacaaaaaatcaccttattactgaaatttcagggtggcggcgggtgctgctgattgtttaccattaaatttttacaagtgttctgactcctggcggatgccaggttcttaatgctgttaagtcatgaatcttctttgagaaccaggaaagctctgcccggaaaaatgtacatgcagtttcagataatttatggacttcctgaaactcatcctctgaaccctgttccccaaatcaaacatttaacttaaaaaaaaaaaaaagaccgagtcacttccccaataatttcctcttcaccgcacccctcagcttttggaatgaagctatgtcaaaaagacctgcctgggtgaacccctgcaaatggaggtcagctggacctcagtaaaagcccagtgggaaggagcggggacgattctggcgatcacatgaggaagggagcagcctcagcagcgcaggtggacacagtcgtcaaccactcgctggccgcctgcgacgtgaagcacctgcgctgggcgcggcgggtaagcgccgacactagcgggcgcctgaacagtccagcggcgtcagcgctgcggagcaggaaagggtcccaaacgcagggcggccatgcagcgtggcgcccacctgtccctctcctcgaagcgctgagccagcacgatgcacataagggaaggaggaaggtggcttgagggcagtgaccgagcggacagcggaagcccatttcaggagccccggtacccgagctcgggcccctttccaatcccccaggcgtccttcccatgtccttgtctcctagtcctgggaatccacggccactccactctcctgcagtaccgcggacaagaacaccatgtactcttcacaggcaggtgtcttctggtggacccaactctgttggtacttgtcgtctccaaaaagtccccaaatgcgctagaggccagccagcccggtatccgagaggtaagagccccggcggcgcaggcggaagcgtgtctgtcgcgaggcctctctaggactccgggaggacccctcgttagcgcaggacctcggcagccgggggttgggctcgagggctgagggcggcgcgccatgcgcggattagctgccatccggcgggtctttctgccggggaccagtggggtcggacgctgagggccgaggaaccccgcccccccaccgcaccgggcgggctctggggcgtccgcggaggctcccgcgtgcgtgtgcggggtggggtcggggtggcagttgggggcaaatcaatgggcctgtacttttgtctctccgcctgctgggatttgcagtttgtgaggacgtttcacatctcacggatatttacggagtcccttccacggcccaggctcttctggacaccaaaccaggcctaatataactatttaatatctaattattacaattaaacttatttgcagtcgggaagcatagactcaaaacacgaaaggcagggttggctttagaaagaagtcactgtcg[222 bp omitted]gaggcaagagaatcacttgaacccgggaggcagatgttgcagtgagccgagatcgcgccattgcactccagcctgggcgacagagccagactccgtctcaaaaaaaaaaaaaaaaaaaaaaaaaaaaaaaccaagggctgggcgcggtggctcacgcctgtaatcccaggactttgggaggctgaggcgggtggatcacgaggtcaggagtttgagaccagcctggccaacctggtgaaaccctgtgtgtactaaaaatacaaaaaaattagcccggcgtggtgccaggcgcctgtagtcccagctactcgggaggccaaggcagaagaatcgcttgaacctgggaggcagaggttgcagtgagctgagaatgccccactgcactccagcctgggtgacagagtgagactccgtctcaaaaaaaaaaaaaaaaaaaaattaagaaaaagagaagtatggaagttatgagtgtcagagacagtggagttgatcatttgaggcctttggctaagagggacggtggttatgtgctgggagtgggcagaggtctgggaggctttctggcagattatccagagaatcatcaagaaaggagcaaatgcggtccaggcgagatggctcacgcctgtaatcccagcactttcggaggctgaggcgggtggattgcctgaggtcaggagtttgagaccagcctggtcaacatggtaaaaccctgtctctactaaaagaacaaaaattggccgggcatggtggcacgcgcctgtaatcccagctactcgggaggctgaggcaggagaattgcttgaacctgggaggtggaggttgcagtgagccgagattgcgccactgcactccagcctgggtgacacagcgagactctgtctcaggaaaaaaaaaaaaaaaatagaaaaagtagaaagaaaagagcaaatgcttctatgccctttgtcagctgggtatgtcgcgcattctccaagctggaatgtggatgggggtgcggagggatttagttagagtaggcactataaatctaggttccattccactgactctgaaggcaggggaatcccaggagtgccctgaatgtgggaaggacctgggagagcttcatgccttcaggtggaggtgggagattcctctgcattcatgttcacgctggtgagaaacactagtatgtagagtgtgggaaagccttgagatggaattctcaccttcgagttcatcaggaaattcacactggagaggacctttgaatgccagtgtgggaaagaccagcccagttctcatcaacttcagcatccgagcatgcacagtgcccagggatatggggacttactcactgtaggacactttcattgtgacatgaaactttgatctttcctcttcttcactgggggcagtaattttgctttgctccttgaggacagggctaacttgtagaatagtgttcaccccagggttgccactcaaaaatcaataaatgaatgaatgaataagaggcaacaaatgatgatctgatttttctgtgatgtgggcaagtacagtgttgaacaggtgaaccaaaacctttctttagttgagggaatttatcataccatttactcaaaaacaagatagccacaggttgctttaaacacatccacgccgggcgctgtggctcatgccactttgggaagctgaggtgggcagatcacctgaggtcgggagttcgagaccagcctgaccaacatggagaaacccccgtctctactaaaaatacaaaattagccgggcgaggtggcacatgcctgtaatctcagctacgcaggaggctgaggcagaagaatcgcttgaacccaggaggtggaggttgcggtgagccgacattgtgccattgcactccagcctcagcaacaagggcgaaactccatctcaaaaaacaaacaaaaaaacacatccctatcagccgtgaaaagcaaaggaagaagaaatcagatcttttgcctgtatcctcctcaaaaatctttctttcatactcctcaccagcctcctgtccatcctccccacgctttggaaattacagctctcatcataccccttacttctcaggacgcttttccccactctcaccctgcccctggagcccatggcatcctgggggaaaaatcctttctgtggcattcaagacccttgacaactggtcccagaacctcccatcccagcaccggcaccagcaccatgcacgagccaccctgatctgcttatactcacatacacccagcactttgatgcctccttgcctttacagactccatccctcctcccagggcaccgctgtccatttaacacccacccccacccttctttacttctagcttcaaggaccattgcaaagggcttgtcctctgaggccttccctgacactcctccaatcccctggcagtagcagtttcctcccaagggctcctaaggccaaggattgattcacagttgttgacttagtccatcttccccactagaccgggacctccccaagggcagacactaggtttgaatcaccttcgagtcccaggcattgtccagtccagggctgggtccagagggagacattctgtgaacacttgtgctgatcagtcctcagttgaactgagggaactacctgcagatctctggagccctgtgcgactctctcctctctggtgctcttctaccacatcctctctgaattctcaagtctgtctcctcaactcagggagtctgctggctgtttgggttcctccttctggcactgcagcctagaaactcaccctatagaaagctgggctgggccaggccaggcgcggtgcctcacgcctgtaatcccagcactttaagaggcccaggcaggaggatcacttgagcccaggagttccagaccagcctgggcaacatggcaaaaccctgtccctacaaaaaatacaaatatcagccaggtgtggtgctgtgcacctgtagtcccagctacttggaagtctaggaggtcgaggccgcagtgaactatcagcatgagaccctgtctcaaaaaaaaaaaaaaaaaagaaaagaaaactgggccagtgcgaggactcctctcatttgtttcccttccctcagggctctttcacattgcctgttgcccagttctgaaaattattgtttcatatattttatctggctttttaatgtgggatggtaaattcagtccctgttactccatcatggtttcatggttggaagcagaaaaaagaaatttgtttctattttttttttaacagggtctcactttgtcacccaggctagagtgcactggcgcaatctcggctcactgtagcctccacctcccaggttcaaccaatccttttctgtcagcccctcaagtagctgggattactggtgtgtgccaccatgcctggcgaatttttgtattttttgtagagatgaggttttgccatgtttcccaggctggtctggaacttctgagctcaagtgatccgcctacctcagccccccaaaatgctaggattacaggcgtgagcaactgcgcccagccagatttgctcatttgatgtaaggtttatgtgtatgccaattctgtggctgatggaactctttcaaggctttcattttttaaataaagaccttcatttctcattgttccattaagcaattaaggtgacagcattaatttgaagaattaacaagaattaattacatttaatcttttttttttttttttttttttttttttgagatggagtttcgctcttgttgtccaggctggagagcagtggcgtgatctcggctcactgcaacctccgcttcctgggttcaagcgattctcctgcctcagcctcctgagtagctgggattacaggcacccgccaccatacccagctaattttttgtaattttagtagagacagggtttcaccatgttggccaggctggtgtcaaactcctgagctcaggtgatccacccaccttggcttcccaaagtgctgggattacaggcatgagccaccatgcccattcaattacatttaattttaaatttaattaaattttgcattggttcctgggcagtagagacagtctcatcagtgggaccaagcactcatgtgtctgggaagcagtggtgattgggacagtgagtttggctttctctgctccacaattcaagttagaaatgcaaaagccccacttttcttccttgcagctctgagtaaagagtaccgtgtgcacgggctttgaaatcatatttaggttcagatcttggctctggcacttatcaattatgtggccttggacaaactatttcatctattttagtctttttcttcatccgtaacattgcaacataaagcctccttctgaaggttagtagtacagttcaaacaccgcttcagtaattttcgggtgcctggaagaggaaagtgactcccttaaccctaagcccaaagcttccccatttccttgtgctccctggtttgcagctctcctccctcgcccccagggcttacggccacactgtctgtagggcagctactctgccacctctggcctcagggtcctcttgggtgtgtacagaggcaggtgcctgagaaaggcctgtagaatggggctcctggacagagcctaaggctcttggtaggaaaacttagagccatttgcactgtttggcttgaagcataaactgagctggagtctagagggagggtgggctggtttctgcctggcagtcagatctacccccaaaagtcctactgatcttgcccctttcatactttccaaatctgtctcctcttctacatccccaaggccactccctcagtttaggtagccatattacttggaggttacaagtctcctaataagagtccgttttcagttttccacactgcagatgacgtgatctttctgaagtacacaactgagtaactgacggtgtcactccctagtaatggctccctactgctcttaaatccaaatcccttaggtggcttaaaaggccttgatatctgctacacttcatctctccaacctcatcaaatgcatttgtcccttgcactctatacaacaggtacacttaaaaaaaaatttttttttttttaatttttagataggattttgctatgttgcccaggctggacgaccttggcctccaagtagctgggactatacgtacctgctactgtgcctggcttgtgttggtagatatttatcaactagctaatagctagttcaaaaccaaaaagtctcccatttgctgcatatgctgatttccatggcgtgaatactcccaccatggctaacttcagtgcagacttgggaagggatgcacaaaactggctcttgccagcctgtaccgaccggctctagcacaacactggactagccacaccctatacaataaggtctcaatttcaatcttggtcaggggggtgtggactcttagaagtttgcttcttgagaattctccctcagccctagaggtagtagttgttcccttttctgctattcctgtattttttgacgcagagtctcactccatcacccagactggggtgcagtggtgtgatcatgacttactgtagcctcaacctcccaggctcaggtgattctcccatctcagcctctcaagtagctgggactataggcacgcaccaccatacctggctaattttttgtatctttttgtagacatggggtttcaccatgttgctcaggctggtcttgaactcctgggttcaagccatttacccaccttggcctcccaaagtgctgggattacaggagtgagccatcatgcctggcctattcctatattcttgtttgagagggagtctcactctgtctcccaggctgaagtgcagcagcacgatcttggctcactgctacctccacctccttggttcaggcaattctcctacctcagccacc[137 bp omitted]cggcctctcaacgtgttcggattacaggcgtgagccaccgtgcccagcccctatattctttagagatctctttactccctttagcagataatccctttttactagttaatacttctttaaattttcttcaaattactagtgtggtttttgtcccctgcctggacactggcagatgtgaccctgtctgagccagcagacccaaactagtgtttgggtctgagaaacggccggaactggtcaggcactgcagctcatgcctgtaatccctatactttggaaggccaaggcggcaggactgcttgaggccaggagtttggcaccagcctgggcaacatagtgagactccatctctaccaaaaaaaaaaaaaaaaaaaaaagggagccagacgaaagacccattcacaataaatacaaatataactaacacttcccgagcagctgctcagtgccaggtgaaaaattctaacgaaggctgggcgcggtggctcacgtctgtaatgccagcactttgggaggccgaggtgggcggatcatgaggtcaggtcaagaccatcctggctaacacggtgaaacccgtctctaccaaaaatacaaaaaaattagccacgcgtggtggcacgcgcctgtagtcccagctacttgggaggctgaggcaggagaatggcgtaaacccgggaggcggagcttgcagtgagccgagatcacgccactgtactccagcctgggctacagagcgagactccatctccaaaaaaaaaaaaaaaaaattctaatgaagtagccaggcatggtggctcaggcctgtaatcccagcactttgggaggcagaggtgggcagatcacgaggtcaagagatcgagaacagcctgaccaacatggtgaaaccccgtctctactaaaaatataaaaaatcagctgggcatggtggcacatgcccgtagtcccagctacttgggaggctgaggcaggaggactgcttgaacccgggaggtggaggttgcagtgaactgagatcgtgccactgcactctagcctggcgacagagcaagactccgtctcaaacaacaacaacaacaaaattctaatgaggtagacattattggtgggcaaactaggcagatcatgctggaaagaagcaaaacaacttggctactacttgcatccaaagcatcctaattaatatcagtatcttcatcagaggacatgaagggatgatctacaggcagaactaagtaaacagtttttccaaaatcaagaaagacacaggaaaaatcttaaggaacttataacttttatgggatccagtcctaaagtagattagaccgatgtagaattctgtctggagacgttctccccttcaattcaatgggaaggctcttttctggcatgaactctccgatgtctaatgagctctgagcaccatccataagctttcccacattctttacatataaaaggtttctctccactgtgaattctccgatgctgacttagatatgagctttgactaaaggccttcccacactcattacactcatagggcttctctcctgagtgaatcctctgatgctgaacaagatgagcaccccatctgaaggccttcccacattcattacattcgaagggtttctctcctgtatgaattctctgatgctgaccgaggtttgagctctgtttgaaagttttcccacagtcactacacttatagggtttctctccagaatgaactctctggtggacaacaagatgtgagttataaatgaaggttttaccacattcactacattcatggtctttcttccctgtgggaatttccttatggatgacaaccatctgcctgaaactttcctcctgggcaggggaccacctcagtctctccgctttgggatttctctgctgcagttctaaggtaccctcagaggtagcttcaaatgtagaggtgtcagtagcaagtttttctgagaacacctgtgattccacttcagtaatgggtggttgtggcaatgatcctttgtccttgggctctgggccatcttctgtaacaactgacagaaaatgtaaatatacctgttctggatgtatgaagaaatgacacttagattaaaatgtatatttctggaatgaaaacaaatgcttaaaaacaactatatatatgacaaacattcgaagaatatttactggatattgccaacagttatctcttggtgatgggactatacagaggagagggtttcttctttttaatttctcccatttatctgctttttttcccctaatttctccataatgaaacactaaagaagttttattgaaaaaatgaaagcaattacaatgcatggtctttttaggatttttcatattttcaaggaatcagggaatgatgttgtgaagaaagggaaaaacatgaaagaatcattagggttaaggaaaagggaggtttctaaaggcaaaaaaaactgtgcccttcctggctctgcaaccttcacctcttcccatccgtttcccagctgcatcaatctatagcctctttagaggactctcaactaactgcctcctttatcaaagggaggacttccagctccctgcctcctatctgcttggtgctctctgcctttctcttccttaaaaagggaaaaagagtgtgt[142 bp omitted]atgatggcgggcgcctgtagtcccagctactcaggaggctgaggc[138 bp omitted]tttttgtttttaaatgtccatagcacattttatgttttatctgttgtaatgctccctatagcctaaggagaacagaaaccaattgctttaagataactcaaggtcatttgactttttttttttttttgacagagtcttgctctgttgcccaggctggagtgtagtggcatgatcttggctcactgcaacctctgcttccctggttcaagtgattctcgtgcctcagcctccccagtagctgggattacaggcgcgtatcacacctggctaatttttgaatttttagtagagacagggtttcaccatgttggccaggctggtcttgaactcctgacccaagtgatccacctgccttagcctcccaaagtgctgggattataggcgtgagccaccgtgcccagccaagatcatttgattttttaaaaattcattttttcaggttaaatgctgtggttaaaaaaatctgaaatatgcttgctatatataaaaaaaaaatcacacaatagctagcttctttttgagagtaaagtaataaaattgataaatgaatagaggcttactaaacagaagtaaaggagacaagaaaaagtctggaaaaaagtcaaggaagaaagaagagctaagaagtagaaacatacttttgggacagagtctaattaatctccatttctattttttcccattttgtaactaagaagaatttgatttttcaaatgccttggtttggtgatagtgatgggggggcagttatggtgtaaaagcaaatatcaagtagactcttcttggttagccgcatattcacaatacggtcacaaggctacagaggtcaacaaggagagttcacgcccctgaggctctaagtctagtgttcgccgctgggagagaggagaggttgtttgcaggtatgtatgcaggccaagaaggaagtttctgtagtgaatctgaagggtagaaggtgagggcacacataagagagtttcagatagggctgtttacatgaggaagaggtggtaaaggtgatgacaggctgtatctcacataggagtgctttatggcttaaaaagtgttttgcgaggcctcagcgagtttaaaaaaaaaaaaaggatctcaaggctggcctctagctcagggcagagttattatagactaggagttaagtgcagtggagatgataaggcataaatgaatgagctatttcctggtcctgatttagggctctctaaagttaagagatgctggccaggctttatatccagataagacccaagttgagcttaatcctcagagctatcttatgaggtagtttattcttactcctaattttatgagtgatgaaacaggcaaagtctctcacctaagagataagaatagtaaggctgtgatgataccaaacatttaagcacctactactatttaccctttacaggtactaggtactgtgccctttatagtccctctttctcctctccctccccacagaatcctgctcctcaccactctttgggaaaggctgggtctccttaggctggagctggatgctcagtgcttcctgggctgctcccagagattccttcttctcccatggctcttcctgtgcaggtccatgtgcagggcctgggacctggaggtgatcaggcaccactcagtttaaattttcttcaaattactagtgtggtttctgtcccctgcctggacacttgcagatgtgaccctccttggaccaaagcttccaaggagactttagagagcctcctcagagtcagcacaagggaagaagaggagctagagtctctttctcattcagggctcgagggcagaaaagacagacacagaaacacatactaactgctctacctggcccaagagaggtttgaacttggcacctccccctacagctgcccctcggtccagcctgaaggtcatcaatctggctcccataacagaccaaatcccccttcccacctgcggctctggttcaagtcctttctctaaatcctccagcacagtcacagcctcctctccactcttagggtgatgtccccgcacccaggattggagctcctcaggcaggatggtcaagaattgttccagcaccaggaactccaggatctgctccttcgtgtgtttctctggcctcagccactcacagcagagtactcgtagttggctcaaggcctcccggggaccaggagtctcctggtagcggagatgcctgaagcgttggcggaagatctcttgactggtagagtggttcccaggtagcctggtctcatactcacaagactgttcctcttcctttggtcccatcatcatcatcttctcttgtccctgtgtaccctgaagggccagagtttcagctgctgttagtgatacagccatcctagtctgcactagctctgcagaaggctcataccagctggaatcttgcaagggccccctgtaacataagaagaaatcattcctcttttttttttttaagacagagtctttctctgttacccaggctggagtgcagtgacatgatctcagctcactgcaacctccacccccggggttctagcgattctcctacctcagcctcccaagtagctgggattacaggcgcctgccaccacatccagctaatttttttgtatttttagtagggacggggttttgccatattggccaggctggtcttgaactcctgacctcaggtgacccacccacctcggcctcccaaagtggtaggattacaggcatgagccaccgcgcccgtcctcctcttcttttttcattcattaaacatatacatatactcaacactccaaagagccaaaccctgtcctatgccctgtagtcccgctttttcttccacccctccccagaattctgctgcactaagtcaatgtttttgagaaacttgcaccgtggtagaaacggggatgtaaagtggttttctataatacaactaattaaatgccattgacaggaaaaatgtatcaagaaaaaaaaagttctgggggcctatgggaagaaatgactattggaagaaataagtttgaagcaaaacccaagtttccagatgcagagcccagagccgagcagctttcagtgcaaggtggaatgtgttggggaggcagcctcctctgagatggctcctccctgctttcaaaaatttctgaagtagtagctacagcaaaagaaaaatataagtcccctttaaggagctggatctcattcaaatgccaaagccctattaaggggcagctatgaacaagtctcgggtacagtggcctgcgtcaaggaaatctaacaggtgtaaaccaaaaaagcatctgagataggtctcaaccaatttaggggttattttgctaaggttgaggatgcacccaggaaaaagacacacaagccacagtaggatccgtggctcgcacttttaccaaagagggttttgagggcttcaatttaatggggagaaagctggcaggaggggaaggaggagagaagagggagggtatgtggtgaggtaagtggccacattcttgtgaggatttgattagagctcactgaatccacatgttgcacgtgaaaagaggaagtcaattatgaatttgtctcgtgctcagtaaatctgcattttacacaagataaggtagacatacagtagaggaagaagtcaaatatgctttgtctctgggtgggtggaggaacgatttctagtcttgtccggtgaagctcggctgttcgtttccattgccagggtgagggaggccacctgggggcatatgttgctttctatcttgcagctatcggtttaggaacaaaaggaaaagcagtttttttccgtgactcagtttccaagcttaacttttccctttgtcatagtaagtttggggtcctgagattttattttcctttcacacagggaaggaggtggaacgcatcagaggccacgaaaggagcacaaagggggaccgctggcctaagacaaaggaggcgcgaggaaaaacgcggagctcgcgtctcccagggtgatgcccggcgccgctggccccagcaaaacttctctaccccggcctcgggcaggtgcccgcccggggagggggctgtcgtccaggccaggtacaactccccttcccacccttcactccctacccaagggtctcgagaaaagagaagaggaacatcaagacccccctccacggcacgtgacgcgacgcaacgcaggtagcgcagcgcgggcaccacgggcaacccaaacccctctccacacacaaccgcggagctgcctgccaggcctgctcactgcagagccgccgctgcctgcgggacgggcaaaagccaagccgccaggtggacctcggggaagccgccgccaacactcacctcacaggaccaggaggttccatcggggcgctgccgcgaatcgcgccacttacagccctcaccccaggggcaggtttgcgcctgcgcaggtcgcagcctcggcctccaactcccagaatcctcctcgccgccggcttccgttcgcggactttggcccaggcgcgtgggcgctgccgagaggctgggagcccgggaaccggttcctggacttgagcggagcgagaaagagcgcgccgcctgcacgactggactggagcggccgggtgccctggaggcccctgggaattgcagtccttgcgcaggtggagagtgagcccttgtaagcgggtgacttcatcaagtttggggggtctcttgtggaattgtacctgaagggcggtgctggcggacagatgtcagggaaattctggccttgtccatggcctgtggtaacacttctccatgagttctattttccaattacctcttcccagacctgatgagagggccacagctaaggaagacggtcccttccacgaaaaaatattccccaaccactagcctgtacaattcctggggcgtagggggaggggaggagaaaaaagaattctaaggttaattttattgcgatgggggaaataggggttggtgttt[137 bp omitted]gcctcctgagtagctgggactagaggcgcccgccacc[138 bp omitted]ttttttattttttttttgagacatggtggccaacatggtgaaaccctgtctctattaaaaatacaaaaaggttagctgggcgtggtggcgggcgcctgtagtccccactactcaggaggcaggagaatcgtttgaacccgggaggcagaggttgcaataagctgagattgtgccactgcactctagcctgggcgacagagtgagactccgtctcaaaaaaaaaattaattaaaaataaatttatctcactatcaattttgcaggatattgattgatccagtctctcaatacttttataaaatagcttaatcctagtctctccaagaaaaattgttgttcaactgtgtagtaccatagtaacagttctcagattctcagattattaaatttgtttctccaagatatagtatccttgaaaatgcgcattgacacccccatggctgggggatatattatcttttttccttcaaagtgccattgataattactgcacgtaggagctatggataaaaatagttatcatttgttgaatgtctactacgtgtctagaactatgccaggaacttaatgaaattgtcttatttagtcttcacagttgctccacaagggattgtattaatgtcattatcttgattttacagatgagaaaactcaagactcagaaacaataaaggttacagagatgaaattgacagagcctgaatttcagtatgtcaaacttcaatgtgccattatacttttaaatcctacagaacagattgaatcacaacttctacttttacatgagagaagacaatgggtcctatgacttactgtcagtttccttttcctgatttaattagctgcttctgtatctaattttgctaggaatggaggaataaggcaaattccctaaactacatattgacatttatactaatgtgaaaacctcaagtccatttgcagacttttggattagattctgtcccagaaagacatccaccctagagttcaggatatcatacccattttactgttcccctggcacaattcatagtaaggaaaaacagacaaggggaaagctattagattctcggtgctgctaaacaggacacacaaggacaccattttgtgatgatgatggtgctttatgcagcttccaccatttacaagattttcctgtggtgtggaacctctcatgataaagcaaaggaactagaagcttattccagtcaagatttctgatttatcttgtggtaagcatttgggaaggacatatctgcacatgacctgagactaagtactatacactgaatcagatgaaaattgctcttaggaagcttacaattttccaaatagttaggacaaaaacaaactctccttctctcttcctatatgtacatactgacatctttatcattactgtcttcctagggttatgattctgtatggtttctttggtgctgcattagacctgagctctgattgaaaattcttccacgctcgctacattccaaaactttatctccaatatgaatttccagatgcctcacaaggtctgagctccatctgaaggctttcccatgcttgtcacattcatagggcttttctccactatgaattctatgatgtcgaataaagtgtgagctctgattacaagtctttgaacattcattgcattcacaaagtttctttccactgtgaattctttgatgctgaataagttgtgagctccccttcaaatctttcccacacccaatgcatttataaggcctctctctcacc[133 bp omitted]cagcatggtgaaagcccctctctactaaaaatacaaaaattagccgggtgtggtggtgggtgcctgtaatcccagctaattgggaggctggggctggagaattacttgaacctgggaggtggaggttgcagtgagccgagatcgggccactgcactccagcctggcagcagtgtgagactccgtcccaaaaaataacaaacaaacaaaaaagacaccagagggctttgggtccctctctctctgccatgtgaggaccctgtgagaaggcagccagggagctctcaccagaacctgaccatgttgggccctggtcacagccttgcagcctccaaaactgagaaaataaatttctgttgtctggcatccagtctatggtattttgttacggcagcccgagctaagacagaggaaaactgggggctgatgtgacggcggggactttaggtagaaggaccccacgtcaaaagtcaaagctaaaaattctggaacgagccaggaaggcatcaggacgtctcattttatttgctagaggcatcttttggggggtggggcggtgggtgggtggaaggagatgtggccagtgagcctctgacttttaattgagttatttcgaaacaaggaacagagggccggatgtggtgggtcgtgcctgtaattccagcactttgcgaggccgaggccagtggatcacctgaggtcaggagttcaagaccagcctggccaacatggtgaaaccctctctctactaaaaatacaaaattagcctggcgtggtggggggcgcctgtaatcccagctactcgggaggctgaggcgggacaacagctttaacccgggaggcggaggttacagtgagccgagatggcgccactgcactccggcttgggcaacagagcaagactccgtctccaaaaacacacacacacacacacacaaaacccaaaacggaacagaggcagttctgtattccagagggattgatttgtgatgcctgctcaaaactcaagaagccaccaccctgatactcatcaaaccccggagaaatttcgtttttagagtgtcagaaggccccatgaataaccttccagtcactgagggaggtccctactcagcacgccccggtctccttcactctcctgcactcgtgcctcacagatggcctcatgcgcggactggcggtccagcctcccggggacacagcccgggcgcaccccgcgccgcctttggccactgaggcggtcctcgaggcgccgggctagggaaagcctccccggccgtcaaggctgggatagcgccgggggatcggggcggggtgcgtgcgccgaaagggcctcaaagctgtagggctggacggcacaaaggggcgcaaggcacggaggccaggcagaggggacagctagcggcgcggcgggacgggcgggccccgacgcccagctccaaatgcgtggccgctgtgggagctcgtctccaggcgcccatcagtcttcccctcactcgacgctaccttggcggccgcgcccatgctgtccccgctccaactagcagtcaggaggggccgcgggcagcgctcgagacgctcattgagaggacttcccgcctgcgggctctctgctcgacgccactcccggccccgctccgggcggcccccctcaccactcccggccccgctcccggcggcccgcctcaccactcccggcttcccggggcttaggcccgcaccatcgagtcgaaccgagtcctcatgttttcctagacaagccgctgggggagaggggaaacacttctggcccatgtgagccgccgtctcgtgtggtgtctgaggggcgtctacctggagtcactgagccgacgaaagggaaaaggccagtgcctgtccgggaagagctcagcctagtggggcgggcgacaagttacagttgctgccttacgatggccgtggcccgtggaggcactagaccctcaccaggggtctgtcaggaaaggcgggcagatacgtgaggcctgaacaggaaggaactgggagacccaagactgtaccgccaagaccgctttcgagtcgggccgaccggaatttgaattcgtttcttcacttactagttgtgagtctttgggcaaatttgcctttctagagcgtagtttcttatgtataaaacagggttaacagttgcactcactgaggtaaatacaagagaaaattgatggtaagtgcttatcacggtacccaacacatagcaagtactgaaaagtgatggagctaggtacggagggagcaatcttcacagagggaacagctcgtggaaaggccacagggcaagagggcggtgcctacattcttggggaactgcagagagttcatgggtaaataataggaaggaaaggtaagtactttgcagaaagccttccccagctaggtgagactccccactgtagtatcatatgcctctcctttttggcacttatggttgcaactttattaatgattctaattagtttctcttctacaattataagttccatcaggccagagacttgtccatttatgctcaccctgctttgtagcacccgctgc[138 bp omitted]ctacaaaaaatacaaaaattagccgggtgtggaggcacacacctgtaatcccagctactcaggaggctgaggcag[136 bp omitted]aataaatggggtcgcatcagaatatatatgtcacaataaggactttggacttcaggctgaagttagtgggaaatcactgtggaaatttagagagggggatggcactatcagatttgttctgaaggaagaacattccagctgccctgtagagaagcgttggaatcagggaggcatgttaggaggctgcgataatagtacaagcaagagatgatggtggcctcactctaagggcattaaaaatcaagacaagtgaggccgggtggggtggctcacacctgtaatcccaggactttgggaggccaaggcaggcagatcaccaggagtttaagaccaggctggctaacatggtgttagctgggtgtactggcatgcacctgtaatcccagctcctcccagctcctcaggaggctgaggcaggagaatcacttgaacctgggaggcggagattgaagtgggccgagatcatgccactgcactctagcctgggcaacagagtgggactccgtctcaaaaaaaaaaaaaaaatcaagacaagtggactatattggcagattactggctagcattcacttattctaccatagtcatgtgctctctccctcagggatggtagtgacagtcttatttcctattgatacaggatttttttccttgattccttcgtgggactcaagacaggggtgccctgtttactcagcccactgtgctcaacctcttgcaggagtgtgcaggtgagtgagcaagtgcaggatctggctggccactacaggcaccagcatgagcaagctctttgcggagcctgtgaccagaccaggcatgagcaaacgactgcaggatctagctggctgctctgggcagctgcaggagcaagctccatttggggtctgcggtgctgcccaagtgggggtgcctgtgatcccaaatccccagagggagtgttacagtgctctcttagcgccactgtttgaggatgggtatgtgttaacagctcagctggcccctagccccattgcgtggggtggctacctgccactggtgagggcaaagggtgagtgtgacagccttttgggtagccaaacttggtgggtcccaagctcttgtctggcatccaaaaagaatgaggttgtgtggagcacttgaaggatggtgaaggtggagaattttacagagtgatcacagtggctctcagcggagaggggagctagagagggggtagaaagggcaggtcatcttctccccaaagtctggccatttcttcccgaaagtctggccatctctctcatctactgactgagtctggggtctttataggcacaggatgagggtggggcagccataggtatttttggaaaaggcaacatttgattggtaagaagacattattcagaaagaaccaatcgggagggagtaagcaaacaggaatagaagttctcactttgggctgtgggtttcaggcttttcggctcaaagatggggtttcactgggggcctgccacatctgcttagaatttctcaacttcatgtcctgcctctatcactatcaagtatttatatgaagaaacctctcctaagccacactccaatcacccctcttcctcaaagagattatcagactctgactttttctcagttttggtcctcttggagtttggttctttagctgtttaaaatcttatgaaggcaaactttgatcatttaggctcttttctcaaagttccaaagtagactgctccctaacaggtaggttttattttgtggaattcaggtttacaaattggacattactacattagcttctgctacctataaaagctttgaataggtgggcttttatttcatgaattacctgattatctgaaaattaactcttttgtccttcttcagcccccactaaagtgaggtcagctcagggaatgcagcagaaattcacctggaagcaagcgaggctggggcccagaaaccccctgggctgggccatgcttccagtccagttcccatcttttatggatgcctagccctgaccctcagaggaccctgggtgaggcctggaggagcccctcttcccaaatagacttcatttgtcccttgaggctcagctcactgcagttaactaactaatgagtaactcagtgtaagaacacacaatgctaattattataattaattataatagtgatagtcattaaaacaaggaacttctgcccagcactacaagtgactcacagccatcatctcagctgataaacagctgggagaaagatactctttcttccttttgacccgtgaagaaactgaagctcagagaggttaagggatttatctacggctgcacagggacccctccttcaggtctgtcggacttgtatccaccccacctctctgccccctctcctgcctctcctttccagaaggttctaggtcccaggaactccaaggctcaacccaaggatagagatccaaggtcctgccggggcagtcaggaggccttacgtgccctctcctgtggcttccttctcagccgagttctgtgctgctctaagctggggaagcctactccccaagaagcaggacacccggaaggtgtttccccctggctttgaggctggttatacattgctttcctccagcagattaacatttgctaatggggcctggcacggtgacaccaacgtagggttgctctctgcatgcctgtgctgtggggttggtggtgggggcaaggcagtggtgggggcaaggtcagggcagtgagtgaggtcgcctgtggtcatcctccactgtgctggggggttgttatctctcagggcttagcacttgttggggatgggtgaagtccagtcccgagtcacagtgtgtgttgtgggaggttgctgatattcatagccctgtatgtttgagtaatgacaatatccacctccaccttcagggtgaggagctgttggcctatctgtgtctgtctgtctgtctgtctgtcatctgcacctgtctctccgagggaaagaaggcaggccccagggtctttccccaggatggccttgggtgagctcctgctgtcctctctgcccaggaaatgaaggccctttgaggtcaggtggatgaggatgtcagtgtgaagatggacactgtgcctggagtgaacctgagctggatcctgaatgagatgcatgaccaggacaagaaattggtggagaagagctacaaggatgccaagggctgtttcttcagcatggtgggtggccatatgtaagcaggtgtgcacacatgtgggcacatgtgctgcatgctggtgcagctggaacgctggcagatccacaggctgtcccagttggaaggactttggaaaccagttggaccagcccctcatgatttcgatgtaaaatgtgaggctcagagaggactcaagctcacacagcccttcactgtggcctgcaaaatagatccaggtctctacaagtctggtcttgggtttccaccacagctgtttacaggatgtgtgtatttgagtacatacgcatacccttggcaagcacaggctgagtgtctccagtgtcctagggacagcaataggtgcaaaagaataacacccagtgcctgtctttgaggtgccgcagttcggtaggggtaagaaatgcaaacaaccgcagagcaggctgaattcctccaaggtccaacgtgggtgcagagggtctttgtgtgcaggtgcctttggggccccatagaggccagggaggggctaggatatggttctcagcccctttcctgtgccccacttctgaaaatctcctgaaacccctgtggcccactctgccttccagagagaggggctgaactgcgaggtggccaccaacacagaggccctgcagagcggcaggatagagatatggagctctacatctctgtgcagaacctgagccatcccagctcagcaaggtagggcctctgtcccctccccaccctgtacctatcaccccagggtgagcccagccttatagacccctgcttggaggtgtgttacgggacccaactggcccagctgcaggggctcatcagaagcatggagcagcagctgtgcgagctctgctgcgacgcggagcaccaggaccatgagcaccaggtccttctggacgtgaagacacggctggagcaggagatcgccacctacagccgcttgctagaggttgaggacgctcagtgagtgtgcacccgggtacctgctggggcgggctgggggcccacttcacctaggaagaagttggtgtctgagcaccagtgaagttcaggaggtgtgaatgtgggaacctgtgggggtttgcaggaggtgaaactgacaatgcaggctggagtctgattgaggagccttgaatgccaagttaaagcgtctggattagatcacgtaggcaatggggagccatggagggatttggagctgaagaggggaatgaacatcaagatattttagaacattcactctggctgcagagggagaaatggatcagaggggtcagggtggggccagagagatgtgtcagggggctggagcagggagtgtggccagagaagtcctgcggggtggagggtgggtcggtggggtggcaggggaaggaaggtggtgcacgcagaagagaggttatagctcaaaacagcaggactggatgcctggatctcagggtaagcgtgactcacagtcaggactcagtaagtgtggggtgaacacatgaaggagtgggcattgatggccctggatttctggttccgatgactgtgtgagtggtgacaccatcagccacagggtgaagagcaaggtgggtggtggtcgggtttgcaggtgggaagggtgatcaggccttcagctggcagtatcctggagtctccatgcttagtcacacgttgcagctttttgctccccgaaaaggtttttccatcaaggtttttccaaaggacaagcggcccggcggtcctcttagttccttggcccgcgtgccacccgggaggccgaaccggccccagccctgggccccctccccagcccaacccagccccgaccctccgctgcggggccctcccggaacggccggctgcaacgcgtgtctcccctggacacagctccgcccttcccgggaacaaaagcagctgcccgcgcctaagctcccacccggagcccagccccggaaatgggacacccgcagcgggtatccccaaacttcccacctctcaggtccggtagggcgaggggtcggggccggtgggtagggcgcggagagcgcactgagctcttagaggtctgtggccccgcggcggggggttatgccaaggaagaacgcgacgacgcgagggggagggaccgagagcaccccgaagccggggaccgccaagccggagccagtggagggggcgaagtcggcgagttggaaacttactgcaatcgtcctctcgtagccttgggcgtccggctcgtcttctggcagcttggtgggcggctgcgcagggctggacctgggctggatccttaggctccgaagagatgggccccatccttgtcgtcgtcgcgggcgccgtcagaggggcggcggcagcggccggcgctggcagtggctgggcgcgcgggggcgtcatggggcaggtcccgcgggaagtgggggaagtagccagagatctactggatggggcgggtggggctggggcacacgtcggtggccacatgctcctggatacaaatggtcgccttttccccgcaccgccggtgggggggtggtagaggcagcgcctccccgcccgggcacggcctggcccggagtgaccccggcccgggggcggctcagcaggcccggcgtggcgtggcgtggcgcggcggggcctccgtgaaggccagcgccagtgagtgccaggggcgggcaggcagggggccggcccagcccgcgtcacccggcagcaaacacgcagggtgagtgtgcgggctgcccaggcagtgcagagcggagagagctgcgtggggccacactcactcgcactcacaccgggggggcacgccggcctgggaccccgtgtgcgcactccctggggacaagcggggagccagcaggacagggacccgcagaacgcatactcacacgttcctgcaggtgccagcacatgctgggcttcgttcgctctcacgggacacacgcaggtgtgcaaggacaatgcaagtgcacgcacacgtgtgcagacacgtagtggaagcatccactggctcacacctgtaggacacacacacacacacaaacatgcacacatacagagttggttgaggatgctgttaacaccgtacaccccctaatgcatgctcgcgcgcaagcacgcacgtgcgcacacacacacacgcacacacacacacacacacgtgatcaagggcacccagggcagaatcttccatacccctaacaaggacccctaacaagacgcacaaacacgcacccatagaagtaatcaggggaccctaccaggacacggagtcacactcctaggcatgtgtggacaggctgcctacccacgggcaggacatggacatgctcaactatacgaggacactgcaggcacagtctgtgcacacatactctcaggtcacataaacacagcactctgtaacctcgagtcagtccctcacttggtcagtgagtgggctgaagcacccactgggacagggtggctgagaaccaggacagggcctgggaagtgagtgatgcaatgaggttgggcggtaccaccccccacccaaccacccagtccaggcttcccacataatcgggtcactaaacaaatcccagagggcccagccccagctgttgcctggctttccagaaacagaactcggttgggaatggcagctgcttggacaggtctgtccccagaaagccctgggcatggatggattcctgtctaccctctggtttccactgacacatttatctaccaacattttgtccaagtctcctcttctgagccctcaccagaatcacccttaatgaagagtcacagggagaagacgtccacccacacatcaggagacaggcctggaacagagccttcctgcacagcctcagaagggacccaccctggtgacaccttgatcttggactgacactcatgacctccagtactgtgagacagtaacattctgttgttgaaggtgcccagtctgtggtactgtaaaacagccctgggaaactaacgcagcctgttagcccacagatggtgaagggatggaatgctccacggagctccaggcttactatctacagcccccaaagtgtgctgcgggacccttgggtgggtgtaggtatgcaaggtaattttgggtggttcaaggtgaataatttcaattgacataataatgtatttatcttgctgggtaaatgagggatacccaactgttaggaaccaggcaacacagcaggaggtgagcagccagccagtgagcaaagcttcatctgtagaaacagccacttcccatccctcgcattaccgcatgagctctgcctcctgtcagatgagcggtgccgttagattctcacagaagcatgaaccctactgtgaactgcgcatgccagggatctagattgcgtgctccttatgagaacctaatgcctgatgatctgtgactgtctcatcactgccagatggaaccacgtagttgcaggaaaacaagttcagggctcccactgattctacattatggtgagttgtgtaattatttcattatatattacagtaaaataataatagaaataaagcacacaataaatgtaatgggcttgaatcatctccatatcatcccttccccttctcccgggtccgtggaagagttgtcttcaagaaaactggtctcgggtagcaaaaaggttgggaaccactggtgtaaatgctttaaggaatagttaagcagcttaaagtttacatgctacaaaaaatacaggtttaaatgctaataaaaatgggtgcaaatgaaaacactctcttgctgtggtccaaggaatcttaggcattctatcagaaagacttacagcttggagttgcagctgccctcccacatcctgtccactgtaacccttgcaacacacaaacacgcacacacacgcacatgcacacacacacacacacacacacacacacacacacacacacacactgtgtttcatgccctcactagggtggcctgggagggaatgcgtgggttttttttgttttttgtttttttgagatggaatttcactcttgttgcctaggctggagtgcaatggcgcaatctcggctctctgcaacttccgcctcctgggttcaagcaattctcctgcctcagcctcccgagtagctgggactacaggcatgtgccaccatgcctgggtaattctgtatttttagtagggatggggtttctccatgttggtcaggctggtctcgaactcccgatctcaggtgatccgcccgcctcagccttctaaagtgctgggattacaggcgtgagtcaccgcgcccagccgggaatgcatgcttttaggagaaacgaagacaactcaggaccctcattctcctggtgtttgcgcaagtgccttctccgtagaccatgcttcagtctctttcttagttctccttcttactgaaagagagaagcagagccccagcatgtacccagctgcttagggcccaagccaagtgcgcaagtttcctggggagcctagtgagtggaaggcactgcagatcctccccaaaagaggcgtcggttttttatggatccttgagcccaggaaggcaatagacaagacatcacggttcaccagaagagacaacaaaaatgtagtgaggaagggctgtagtcaaaggttttatgctccatgagaagggattctcagggctctaagcagcaggcagaagactttattgtatgtgtggttaggtgacggtgacctacagttttcactgggaactgggatcaagagtaactcgacctcctactcatgcacgtctctctctgtctctttgcgttttgtgtctctctccccatctctcgccctccttatcctctcagcctcctctgtctctctcccaatttctcttcctctctctcattcccttctcctcatctctctttctctctccttttccagttctctctctctcctcatctcgcttcatgccactgttcaggctcctggggctccacgtggacggctggacacaggactcctaggctaattttcacggcacaagcacagggctgcaggaccttggtcccccacctcccagcaccctcaaagtgagaggtgtggggtgtgcccatgctctcctgggtgggcgccccacgctccaggaagcagaaactgcaggacaaagctggcgcaagtgacatgcccacgtggctgccagcttccatcttgggatctgctaaggccaaagcagaggacacctgcccacgactgaccccgcaccagggtggggggaggggtgggtttggggtgggaatggggatgggagccgccactgcaaagcagtccctggctggcttcctgccctgcacccagtcatgcaaggcctcccgtcccacccctgcccctcatcacctccacccctaggctgtccagatccaggctccagaagtctcccaggatccaagaactaagggcaaccactgggctccgccgcccctagtccatgagtcagccacccctctgcaggctgacaaaccttggctgtcacttatcttccgccccaaaccagccccagccccatcctgctgcaggtctgtgtggctgctggagaggctgggctcctttcctcaccccgaggctgcctaatatgctttctggatcctggagaaaactgacccactattctcatactggtgcaacttcttccaagacctcaaaactggacaacgtgaacttgtcttgtttcttgtctcttcttgctagggctgtcattgggacagtctgagatggggagtcgggggagacaatggatgaatggatggatgaatggacagcagtccagggagatgtccctgtgtgtcctgaactgggcccttcctccagtgagaagccttcctgagtgagtttatatagtcatcccttggtatccatggaggattagttctagggtccccggggatgccaaaatccatggatgctcaagtcgctgacataacatgacctagtatttacatataagctatgcacattctcccgtatacattagaccatctctagattattcattatgtgtaatacaatgcagatgctatataaatggttgtgatactgtatttagggaatgatgacaagaacaacgtctgcacatgttcagtagagacaaccatccgatttgttttctgaatattttccatctgctgttggctgaatccacagttgcagagctcccagatacgagggccaagtgctttgagagtagggtgggtgaggttgctaatgagtacaggggagcaggtgttgatcagggggaccctgcactgggcatctggacgccctgtctcaggacttgagactccgtttggatggcacaggcagactaagcccaggtcaaagccctccccttggatgttcattttatcccaagctctttctggaccctggaatttggcatcccctaggccctgggtgggacagctgagccaggttttagataacatgtctagaaaagtgggcccctactgtgtgcctggcactttccgcacatgatcctctagctagaatatccaagggtcatggagagaaatacccagttaaaatatcagaaatgaaaaagtgataccattagagacactaaaaagacgattagagatactaaaaataccattaagtaatagtattagcttttgtattctgagattcaacagcagcagtcacttccctccactcctatgtgtatcccaggaccaccctgggcggggagggctgaggtcagggaggtctgaagctggtcctgggctccgggggtgacagtgatgaggaactgggtgcacacatgagtggggcagccgggcctggccagagaagcaacacacacgtgcacagacatgtttatccacatacacatgtgcacgcatgtgcacaaacacattgcaggcaggcatgttgacgcctcaggcagcggaggaccctgactctgggccctgctgacccaggcaaggccccattgtgatgcgtgccatgacctcagaatgtcactggtgcttagcacctatccgctctccagactgcgtctgtgttctacggcagttacacacacgcagtggtattcacaagcggttttgtggactcaaaggttttctccctgagaggcataacccaggccagctgattcatcagaatcaggtgagtgtgacctgctctcttccctccaggctgacttggggacagtggctatggtatgggcggtgttggcctctgggcagctacagaggagggtcatccctgagcactcaccgggcgcccgttctacactgcccatgtagacgattttctctttcgtcttcatggtggcttcgtagagtgggtgctgttcccgaatgtacccattcgacaggtgagccgtctggggtcagagaggcagtaactggcctgggaatccagacaagaccctgggttttgctctcagccctgctgtgtgccatgctagacttcaggcctcaaccctgagacctccctgctctagatcccaaatctgcccagatttccgatcccaatggggcagagcctggccctggcagagacactgggatggatccactgtgggtggggaggagggaagggtcctcagaacacacctggggcctaagctgggtcttgatggtcactgtgggacccactggacacacacagtcccttgtctgggagtggcatggggagccttctgcccttgggcagttgtggaaagtgaaggagccctggagagctggctgaggggagactatcttcccttgtgttcaaaggggtccaggcactggggctctccccaagtatttcttattctgtctggcctcgctttccttttgccctgagtattctcaggagggacggtccatctagatgtcctccaggagcaaggacccactgttcttcatcagtgacccaggaaaatgaagccccctcctgtggggacagctcagaatggtggagtccacagtccctccctgagagacatggtttccatgagcacagtggctgctttggagacagtaatcattttcatccccaaaaccaaacacactcctgctcaaatggtgttattgctaaagcagcttcactggttagactgaagggccatggtagcccaagtgatgagcggggtagaatggagcagtcaggagagatcttgttccccgtaggaaactgggcatctctgtggccctgaacatcccaggaggccgatcgtacagagacctctggtgcctgaccgcagttcacatccacatccctggaatagaccatcacaggctcttcacccttggcaggtggacaccattcaacctgccggggcaggtgtgtgcccatttcatggcatatggggacaaccggattctctgtccaggtcccactcttctcgagtccttgggaagatgcccacccctgcttggggcttcagactgcagagacccatggaggtgtgggccatggggtttggcccctttttaccggagtgcagtggtggaatgaaggttatacaaccagccagcatctgggagcccggtgggagcggttcaggtgttctccgaagctgtcgggtacagtgtaacctttagacaattttgtctcacaggatggacatggtagagaatgcagatagtttgcaggcacaggagcggaaggacatacttatgaagtatgacaaggtacagttcggtctgctccttggagggaggcctcttccagtgcgccctggtcaaagggtcctgggttccctaggagcacagggcagggacgggtggccaatacccccaggcccttgcaccctttaccttggacccctcaccaaggctccctctgggttacagggacaccgagctgggctgccagaggacaaggggcctgagcccgttggaatcaacagcagcattgatcgttttggcattttgcagtgagtcatcctctatgctcccctcacccctaaagcagctgtctcagctcagggatgggtttgcttttagaaaggcctttctgatgcaggacatgtctcgctaggtcgggccaacctcttttccagggtcagaactcctccctggctcccctgcaggtccagcccgaggttgttgttaggccagaggtggaaggcccaactagggagctggtgggaatggagactgggctaggccaggcccctgggctctcagcagttctgtcggcaagtgagcacaagaggagcggggcagcctgaggttctggtcctgtctaccaggagacaaccccagtgagatccaagggttgtggccacagggtgaggagacacctggcccagtctcagggctgttgtccagcaggtctctcagagcccaccggcccctgtcctcctccatttccctagagctacagccctcactgtccccatggggaagggggaaaggtgtggggacagtgggggctttggcccgaagagaatgggggagaagatgggcagggccccgctctgggcatctcacagtgagactagggaggcagcagggcttgtgactaaagaccctgggtctggtgctgggaagggatctggggccaggtaagaggagcccagcctggagcccaaccctcagggatcataggatggagagacagcggatgccgggcaagataaggtgggagggagcttatgaggcgtgccacttctgaaacacagggtgtgtggctcgggtatagggagaggcaggtggatgcttggccagcctcagggctgttgtccagcaggtctctgagggcccacctacccctgttctcccccatgtccttatatctacagccctcagtgtccccatggggaagggggaaaggcatggggacagtgggagttgtggccctaggggaatgggggagaagatgggcagggccccattctgggcctctcacggtgaggccagggaggcagcagggcttgtgactaaagaccctgggtctggtgctgggaagggatctggggccaggtaagaggagcccagccaggagcccatccctcagggatcataggatggagagacagaggatcccaggggaggtagggtgggagggagctgatgagccgtgccacttctgaaatgcagggtgtgtggctcagatgcagggagaggcaggtggatgctgagacgtcagaacctgcaagagccttggggctgtcaagtgggatgggcccttagtgcacccagagtataccgggaaggtctcagggcaggcttccttgaccctggcggggtgatgtggtcactccctgagggactcctgtcagggcccggtcgcccatgctgggtggcccccatcccatctcagggctaacctttctcagctccagcagaaagcaccacctcaagtccaggatgggcagccccactgtggcctgaccaccccccatgccaggggccccagtaaccccagccaggctgtccctgcactccttcttctcccaggtcctgcccctcctgggagtcagagccacaggaaggcccttgtcctcccttccctgtgccttctcccgggctgagccctgagctggatagggacagagccagtcctttctgggggtcggctcccaggcttgggcggctccaggccctgtgcacgtcctcagctctgcctgggttgccttacagtgagacggagctgcctcctgtgactgcacgggaggcgaaggtaagagcctgatgcgtggaggggctggtccagggacgtagggactgggcgggtggtcagtgaggcagaggaagcagctggcctgggcggtggcgggtgagggcaacacgctgtcactgggaggggcagcagagacctgaccccaagttgctgtaactttggcagtttgataaaattccaaagtgagaaccacagtcctggcttggggggtggctgcgcgcttgtgtcaggaccccacctagaggctgggacctaagactggtgtgtctgtggcctgaggatggcatgtcccggggtcccaaagccagcccattggtgctcatttgctcaaaggctctcagcccttagggtctgcccttccctggctccttccagttgggtcccaccagggctccagagcccaagactcagcatccatgggcggctctgggaagcctggcagctccactaactccaacatgcctcatttgacagaaaattcggcgggagatgacacgaacgagcaagtggatggaaatgctgggagaatgggagacatataagcacagtagcaaagtaatgtgtggagggagaggcccctggaagcactctctgcagaaacaggggacaggcacccatggctgtggcctggcaccgtcagcctctcagagggcgggtggcacactgtcctcgcccagaggactgcaggcctggtcaccagattgcctgcctattcgtgcaagtgtcaccttgctgggagggaatctgaatctagggctgggaccacccagagctcaaggctagggatgccctggtgacccgaaggaaggaaaaggttcggatcagagtttagactctgagtgtccatccactctttcagtcctgggaagggagaccctgtcccagcttgatctcgcctctactgaggaatcatggggccaaaactgacaatttccagaatccccaggctctggtcctcactggggtcaccccatggcctgtgacaccagattcttttctgcccacagctcatagatcgagtgtacaagggaattcccatgaacatccggggcccggtgtggtcagtcctcctgaacattcaggaaatcaagttgaaaaaccccggaagataccaggtatgctcagccagagcacaacaaacaggacaggccgtgtcaggggcccaggtctccagctggagggaacgtcaagcccaccctggggtgggggggtgggaggggatggttagatgcacatcctgggcatggacggtgacacagtcaccacagacaaactcggctgtggtgaccctccctggcctcagtagcaagccaaaaagcagctttctgcagaaggaaaccttccttctttccttccttcccgaagtgctgactgtgggctgactgccatttggggcagggagtcttccatctgttctgaggctgcttcctcctcttggccctgccctacagatcatgaaggagaggggcaagaggtcatctgaacacatccaccacatcgacctggacgtgaggacgactctccggaaccatgtcttctttagggatcgatatggagccaagtaagcctacgggagccacacagtcccagcagagatggggtgaacgagagggatggggacttccccggagcagaagccagggtcacccaggagggatgacagagctgccaagagctctcctggcccagggagcagccggcaccatgaaccgagcacctccctggttccaagccctgggccaggctggaacatgtggggccagaacccaggaggatcctgaggagacagaaaacagcaaagaaaatcacacgcaatggtgaaaggtgctctccctgacccacggagacccatggtaggacccacaggagggtggcaggatggagggcccatgagcctccccaggcaacacagcaccaaatgctgggagaattaggggtcctggaaactgtcatccaggtctgctgggaacatgacatggcacagccacattggcagccagttgggcagtggctcacaaagctcagtggacttgaaccacacatccccatggtgtcacagatattgaacccactgatttgaaaactgacatccacatgaaacctgcatgccaggttcactgcttgattcctcatcactcacacatggagccttcggggatggccttcaacacgggaatggggagagacaggctggtcctcccttcaaacggaagacccagtgagaaaagggaacgagccagtgatgcctgcacgaacgtgggtggatcctagatgcattttgctaagggaaagaagccagacccaataagctaccatagtaggattcccattcctaggccattctggaaaaggccaaaccatagggactgagcagcagtctgggtggccaggggctgacggatcggggagaggctgggtgcataggggaaaccctggagatttggaagatgatggagtcgctccaggaggggctggagcggtggccgggagactgcacattggtttggaaccatggaggaactgtgcacccaaagactgaactggtgtgtgtgcaaaagaaaaaaaaaatcattcagcgtgaaaaggatcggtcaactcactgtagaactgggctatttgcatgtcacagatgtggattttactgaaacatttcttcaacagtctcaggccctgaagagctcactgcttatctggtgaatcatctgaacctgaaatgggatttgttaggatttgtagacaaagtgaaactaacagcatctgcacaaaccaaaccatagccccctttctgtgtttcctaggcagagggaactattctacatcctcctggcctattcggagtataacccggtgagtattcccggcagtgaggttcccaggctgtatttccatattcacaggagtgggtgtctggtgggggtgtcgttgcttcttttaaagttggtatttgtgactcaccaggatataggaggtaggattctaggtcaccgctggcataaacctccaagcaagggggtggtctcaaggggtcaagctgagacacaaaggacttggggcctggactcctggtgtcacctgggcctgaccaccacttctcagaacaagaaatgacgccctcctcctggggctgctccaaagcaaaggagcttggcagtgtcacacgcaggacggtgctctcaggagacattttggacaaggtgctgaagtgcctgatggactttgctcttgtcatgaaatgaatttgcatcctgaggaagcctcttcttcagaggaagcctccccagtcacctctgccctctccaatgacatgagtcctcccaggtgacctcagccctcccaggtgatgtccttccatggtgactctggctcttgcaggaggtgggctactgcagggacctgagccacatcaccgccttgttcctcctttatctgcctgaggaggacgcattctgggcactggtgcagctgctggccagtgagaggcactccctgccaggtaggtgaacagctgcccgtggggcctcacgcagccagacccgggaaagccactgtggccaggtgatctcggctttcagccaaggcacactccttgtgttgccagcttgttgggagcatttaggacgtctctgctgagggtcccacaggagtccgcagctgacccccacaacccaagtcagatgcctttcatccccatcagcagagggcatctcatcctccccatggccaccctctgtgtcctggagccacatcctccggctctgattctgttcagctgactctcccctccctgagggtcctcctgccctccagctgcctgggctcctgctgcccttggtgcccacaaatgggctgaccaagcccaggtggcagcatctcaccatcccgtgtcccctggcccgaccccacttccaggagatgaccaggaagctcagcacccaccctgttctggccgctctgttgtggcctcaaagtcaggcttgcccttttgcaccctggcccaggaggcttccaggggaacctccagccaggctccaggggatgttcctgtcccacctccccagggcaaaggccgcatggtagggtcaccagatgggagggcgggaggccttggggtttgggggcctctgcagctgcccagctctttcagctgatggctccacaccttgggggaaggctctgatttcatgatgggctgggggcttctcaggattccacagcccaaatggtgggacagtccaggggctccaagaccaacaggagcatgtggtacccaagtcacaacccaagaccatgtggcatcaggtgagtttatggtcccctcggctcttctcagaggccctgcctcctgtggggctgtaggagcagggggactggagtcccttgtgggactggtgactggcggagtcccagctagggcctgacctgggacgtcgggttctccatgggctgggagttggtttcctttcatgccctggaggagacagaggcacagggatgggggcccagctcctgcagagcagggcaaagggcagtgtgtccaccgggagtgtgggaaggggacagtgttgtggggagttctggacaccgcccagtgttctgcactaggggaaaggtcttcagaggccctggaagatggaggtttttagggcagcccagggggccctgagcacctctgttcatcccatcaggacaaggaaggtctatgcgggcagtgtgcctcgttaggctgccttctccggaacctgattgacggggtaaggaggcatagggagaccctggctcagggaccctccttgccctgcagtgccgtgcttccccagcccgggggtctggctcactcccagcccacaggaggctcaggcgggtccccgaaggacacacaagcaaaaccctctgcccaagaggggtcatcccagggcaatggctgggactcaggtccagcctcatgggcagactgggtcaggacccaacttgagagggctcagggaagcctcaagccctgggcaagcccctctctccaggagccacatacccactcaaatgagtacccccccatgagaagttgcaagaccttttctgactcagcattctggagggctcaggtgaccctcatggggaaggtcactgactctggagactgaagccccagtgtgcgcagctcgagccaccagccccagcctggaagggccaggttctctcatacctgctgtccccacagatctctctcgggctcaccctgcgcctgtgggacgtgtatttggtggaaggagaacaggtgttgatgccaataaccagcattgctcttaaggttcagcagagtaagtctacgtgtgcccagtggggcctggggagccctgcagtcagaccccgactggcccaagggcagcttcctcacactgtcctcatgatcctctgttctggcccagagggaggtctggccaggtgggctgggcagggcactgtgacaccgagcccatcccccacatgacccagatgaaagtcgagagtgtggtgagcacttccctgtccagatcaccccccagccacagtctcctgtgtacatctggatgcctggggtggccacaaaaggattcggcaccgcccagtgggagactgaagtggccacagggtatgagctgtgaccattcccagggaactctcctggcctgatatccaccctgtccctagagcgcctcatgaagacatccaggtgtggcctgtgggcacgtctgcggaaccaattcttcgatacctgggccatgaacgatgacaccgtgctcaagcatcttagggcctctacgaagaaactaacaaggaagcaaggggacctgccacccccaggtgggctccagtgccatgtcccctcccatgtcagcctctggggcagtcaatagtgggcgggtgccccggaccagcaaccctactacctgggccttcctcttcaccttttcttcctcctcttcctcctggactctaagaaagtacaggaggcccaccggtcctcagggcaggcactcagtgcgtgtatactggatgtgttgtgcacgcaggagagggatgtgggcaagaccctccaacaagccccctcccactttccacggtgtctcgctctctccctcacagggccctcaaagttactagatgagccagacccatttgtgggagaccccgcccctccctgcaagcacccacagcctcagagagcagcagaggcccctcactcctgcacgctcctccaaggttgccaggacaacaagccttgagcaagggagacaagggaatcgggtgtccctgacccacagggcattcagggagagggcacaggcgggaccccgggcccagagccagagccaagaattcagccagatgtgggaacggtcagtcctggcatggactgggcagcccaggggggcagagggtgacccacgtccgggcccagtcacccactgcggagacaggtccccatgtgaggtggcaaggagctgggtgacatccaaggcccctcccacttgagttctgatggggggccatatcccaggcccaacagccctgggacgaaggtgtgtggcaggaagcccccagccagtctgaaccctgggggcagtcccaggagccacccaccatgccccaacggcttccccatgccaggcagcacacacccctccctctgggatcagcagactacaggcgtgtcgtcagtgtcagaccacaggggccacacagagaccccaaggactccagagatgcaggcaggtggggcccagcccggaaaggcctgcatgggctcactggagatgctgaccacgtctgttttcctttcagccaaacgcgagcaagggtccttggcacccaggcctgtgccggcttcacgtggtgggaagaccctctgcaaggggtataggcaggcccctccaggcccaccagcccagttccagcggcccatttgctcagcttccccgccatgggcatctcgtttttccacgccctgtcctggtggggctgtccgggaagacacgtaccctgtgggcactcagggtgtgcccagcctggccctggctcagggaggacctcagggttcctggagattcctggagtggaagtcaatgccccggctcccaacggacctggatatagggggcccttggttcccccattatgattttgaatggagctgctgggtccgtgccatatcccaggaggaccagctggccacctgctggcaggctgaacactgcggagagggtgaggttggctttcactgcactgagccacaatgtgggcatggacttcccggccctgcagtgcacccagcactgattccgaccgggatacctcctttgcagctagggacgagcagcagtgcgctcccacttcagggccttgcctctgccacctctacttggaaagttctcagttccctccaggcttctagaagcatctgggccagggctcatggctggataatttcccgaggcttaacaatccaagcaggcttcgcatccttgttttattttttgttaaacttatgaaaatttattaagaaagcgtgcagcttgaaagacatgcacagatggaacacaccagcccccagatcacaaagccaaccatgcccagccccatcccagcacccccagccccacgaccagcgttctgaattctgacaacaccatgagcctgtctttaaactcatggaaggataaccaccttcacgttttgaaataaatgtttcctgttgaaatgattttagatatacagaaatattgtaaaggcactacagtgtcctcctacaccttccatccagctgcccctaataatgacgttttgtaatagcatggcccataaaaaatttaggccgggtgtggtggctcacacctgtaatcccagcaatttgagaggtcgaggcgggaggttcaggttcacttgagtctagaagtctgagaccagcctgggaaacataggtggaccctgtctctagagaaaagtcaaagaaattagccaggcatggtggcatgtgcctatagtcccacctagtcaggaggctgaggcaggaggattgctggagcccatgagttccaagaagcagtgagccatgattgtaccactgcactccagcctgggtgacagagtgagacaatatctcttaaaaaaaattaagaaatgtaatgggagtacaatcctattaactaaataataatgtgaactattatctaaggttattaaggctataattgtcccattttcgcctaacttctcatacctgtcctaagatcccatcttggactcaccctctgccttcagctcatgcctcttcagcttcctgcagatggtccagtaaacacacacctgggctgaatggtagagctgattactcatacacaagggtagacctgtgggcagggattttcaaacttatacagtcaatgagttttccatggtgttctggagagcaccctttaagaaacactttgacagtgaatctaggcctcaatatccatcagctgctctagcttgaatttcttaaatttttttaagagataaagtctcactctgtcaccaaggatggagtgcagtggtgcaatcatggcttactgcagtggtcccataagattataatactgtatttttagttgtaccttttctatgttctaacatgtttaggtacacaaatacttaccattgtgttacagttgcctacagtgttcaatacagtaacatactgtacaggtttgtagccaaggagcaacagcctataccatacatagcctaggtttgtgtaggtacactccgtgatgttcatacaaagacaaaatcacctaatgatgcatttctcagaatgtaacctcatcattaagcaatgcatgtactaaaattagctagattttaaaacttccgatttaggaataagatgtctttaaaaaaaaaaaacagaagcaatcaagtgggtgtaaattagacagataagaaattaacacattcctatctgtccttccagttcacaacaaagatatgagttggcctgaggagatgtcttttacagcaaatagtagtaaaatagatagacaaaagggtaagtctccagtattattttttaaagagattattttaaatgtattttttttcttctttcaactattaaagtgctaacaacttttggttttctagttcaaaagtaattagggcccttctttttcttttttcctgaagcagcatttgatgttggcaaacccaccatcaaattattttctaaatttctttctaactctgcaatttaataatttatatgttttaaaagacatgctagaagaataattgtttgaattattttgaaaaatcatagcaattaaaaagaataattgctgcttctgggttacaaatgagcatggatcatcactgttgccagacataccatgaaaagccttctctagcatttcaaagacctgctagagaattattagcaccatttagctgattatgagagttataaaaaatcttttcattgaatataagtaactgtttgtgccatggcatattactacagctaagctttggttctcatattgtttgttccagttcccacagaaaagggagccacaggtctaagcaacctgggaaacacatgcttcatgaactcaagcatccagtgcgttagtaacacacagccactgacacagtattttatctcagggagacatctttatgaactcaacaggtaaactttcttgagtcactggcctcttaacctgtgactttgatataaacccactatcacctaaatttcctcttttttcaccctgcgggagaaagattttatcttatttgccctatttaatatgaaataggccaaggaatacatctcttgtttcaaaaagaaaagatattttgatgtgagatgctaggcatctttgcccacatgattgtgatttatgagaatctttggcaacaaattttcctctcaaacttctaggacaaatcccattggtatgaaggggcatatggctaaatgctatggtgatttagtgcaggaactctggagtggaactcagaagagtgttgccccattaaagcttcgggtaagcaggttaaaataatataaaagtatttaattcctaaatagttgtttaatcatttttctctacttgttttttgtgtttagccttttagcttaatgaacgtttttggatcctttacttggtataaacaagaggccaaattcttttgcttgtttaaatatttgcaaaatactactgtatatgcagtgggtaggataaagaccaaaggtacactctaaatttgggatgtcattcattttactaatttgtcaaacatcttatatgaagagtaaaccttttttggtaatacttcactattagcagtattctaactgcaaggtggacctcagagtcttattaattacatccaatccaatacattttcaacataactaagatagttatatctgtagaatacaaagaagtaggctgggcgcaggggctcatgcctgtaatctcagcactttgggaggccgaggtgggtggatcacttgaagccaggaattcaagaccagcttgggcaacatggcaaaaccctgtctctactaaaaaaaattatcagccccccgcccagccagccgccccatccgggagggaggtcggggggtcagccccccacccggccagccgccccggcctggagggaggtgagggggtcagccccctgcccggccagccgccccgtccgggaggtgaggggcgcctctgcctggccgcccctactgggaagtgaggagcccctctgcccggccaccaccccgtctgggaggtgtacccaacagctcattgagaacgggccatgacgacaatggcggttttgtggaatagaaaagggggaaaggtggggaaaagattgagaaatcggatggttgctgtgtctgcgtagaaagaagtaaacataggagacttttcattttgttctgtactaagaaaaattcttctgccttgggatcctgttgatctatgaccttacccccaaccctgtgctctctgaaacatgtgctgtgtccactcagggttaaatggattaagggcggtgcaagatgtgctttgttaaacagatgcttgaaggcagcatgctcgttaagagtcatcaccactccctaatctcaagtacccagggacacaaacactgcggagggccgcagggtcctctgcctaggaaaaccagagacctttgttcacttgtttatctgctgaccttccctccactattgtcccatgaccctgccaaatccccctctgcgagaaacacccaagaatgatcaataaaaaaaaaaaaaaaaaatttggtaggcatagtggttagtggtgcatgcttgtaatcccagctacttgggaggctgaggcacgagaaatgcttgaacccgggatgtggtgtttgcaatgagccaagatcgcaccactgcactccagcctgggcagcagagtaagactctgtctccaaaaagaaaaaaaagtagaagaatgaatgaatgaaactaatgaatataagttttatattaatatcacatgtagtagattttggtgaagttaggattattcattatttttatttaaatacaaagcaaaagctttttatattacaaattattaactataacagctacacatttgactacttacctcttgccaggcactattctaattaatttatatcctctaaataattctaatgcggttaataaaagttaggatgcaacaagaccagaaaatgtaattgttgaagacaacattacattatataaaataatatatacacatattattttatacatgctatgtattattatatacacattattttatgcatgttatgtatatattatgtacctgtaaaatatacatattttatatgcatataaaaatgtgtaaaacattatagaacaggatgtctttccatgtgagcaaatgctgttttaatatttctgtcttaaataacatctatgtgcctgaagaacagtttgcttacatgatactgaactgaggacacagtattggccaaaatacttctctttttttttttggtcatttgacattaagattcaaaagatttcatgattatccaaaatacatttgttgaaatggaggcagactaagtactatactatttattttcttacaatggctctgattggattataggacatgttcattccaaattttatgggtaggaaataatgactgtgacttctcttatatttatagcggaccatagcaaaatatgctcccaagtttgatgggtttcagcaacaagactcccaagaacttctggcttttctcttggatggtcttcatgaagatctcaaccgagtccatgaaaagccatatgtggaactgaaggacagtgatggccgaccagactgggaagtagctgcagaggtttgtcagttttgagtttctaatgtaagcaatagacaaaatgttctgaccacaaatacatgtagcacaacttaaatgcaaactaaactattctgagatcagaattttactgcaaaaattaaggaatttctatttctatgcttaattgttatgtgataatgccaaaacaaaaatacctttaatgaatatagaaaactgttgccatttcacattgtaaactttatgggactggatgtaggaataattgtccagtggaatttaaagagtccccgtaattgctaaagtaatgcatacagtgaccaataggcatgctttatacttattaatggacaaataactttaatatttaccattgttaccttgataagaacaaatgaaaaataggattttccatctcaatttaatattttatgttaaatgaagagtaaggattatattctttacttttaaatccaatatatttaaccagtttctgtgaatttatatagaaatgcctctcttttggattttgagagaaaattctcatcttttttattgctaggcctgggacaaccatctaagaagaaatagatcaattattgtggatttgttccatgggcagctaagatctcaagtcaaatgcaagacatgtgggcatataagtgtccgatttgaccctttcaattttttgtctttgccactaccaatggacagttacatggacttagaaataacaggtaggtcacaaagttctgaaaaattacttgattccattaaatttactttatttaaatagcctgaatttgtaagcatagttatttgtttacaaataaagactggtagtcagcatattataatcgagcaacctaattttaggcatgacttgaggtttgaaagatgtagattggggcatgtttttttggtttcaaatatgccagcaactctctttaaaaccctgcaaagccactcacacttttatgtcagatgaacaccaaaaaaatactgatttcacttaatattatccctaagtaccatctgttttagtgtttacccataaaataaaaattctaggctgaaatatttgctattatatttacaggtcagatatatctgtacacagcatttaaggctttcaatgaaacctgcattttactgataaaagatcttttctctttactagtgattaagttagatggtactacccctgtacggtatggactaagactgaatatggatgaaaagtacacaggtttaaaaaaacagctgagggatctctgtggacttaattcagaacaaatcctactagcagaagtacatgattccaacataaaggtaatgttaactactctaagaaacttttgattctatccttcaaagatgacatttttctcaattatgatgatcagttgttaggttatgtgaccaagagagatactaaaacataacgaaaactgaacaacaacaaaaaatgccaagttttccaacccagaaacttaaaagagttttctaccagaataaagggataatactgatggtggtatttttgaagaagggaaatatgtaaggctgcctatatggagtgttttagctgtgtcactatagtataggtttcctccaaagactgctgctattaccaaagactgctgctgttacacttcacagctcttctatattaccactgttactagaattcttcctaggttaaagcattttatgtatttacgaatatatatatttggtcttttaacacactaagaaattaagagtaaagacaaattgacaccaatcatgtctttctacaaaccagctggggaaacaaataatctaataaatatattgcttactctaaattaagctcctgcaactgctattatttatattcatctttgggatttctgaacacactctcacctcattgacattttcttaatatgaaatgcaacaatggcgtctctgagggttggaatttagatccctgagacaaaggacaaaactgaagaagtcagtcatgtacaacacacttcttcctgtgaaaagagataatagttcaacaattgagattagttttcagttatttttatcaagcattcatcctttatgtagttgaaaaattattcaatcatctcgttggttttatggatgaaaggacctaagacattcttttgaaatacattagagagagaacttttcctttttatctgaaacatctcccccttctcatcttgctgctgtttctgtagaactttcctcaggataaccaaaaagtacaactctcagtgagcggatttttgtgtgcatttgaaattcctgtcccttcatctccaatttcagcttctagtccaacacaaataggtaagatagaactagaactccttctcatgactgcacctttaaatatttgtctaagagttgtcatcttttttatatttgttcatgctgaggatgttatagcagaagaactttggaactcaagggaaaccttactgattattccatattttttcgatgagaaacctaaaatttagagaacccaagtgacttcagttagataggtagttgttagctaatatacccttggaattcagatctctttgaacatttatctaatactaacatggcaacagctagtatgagaggaacatactaccagaaaatataaacaatagatatagctagaaagaaatccaatattatatgtaatttaatgtgatcactcactgagtcttttagccactagtatgctttgtctattctttatattacttacaattaggttaattaggctaattccccaactataaagggctttatgaggctcccttcattgacgtgtagtaggtagatagtcctgacggtgagttggtggatgatctaattttagttttaatttagagtatcactgtctaatagaattctgcagtggtggaaacttctgtgatctttgccatccaatacagtatccaccaatcacgtggactgttaagagctcgagatgtggctagtgtgactgagaataatgcatttttaatttttattttattttatttatttatttggagaaagggtctcactctgtcacccagcctggagtgcagtggcatcatcttggctcactgcagcctctgccttatgggctgaagcaatcctcccacctcagcctcccaagaagctgggactacaaatgtgtaccaccatgcccagctatggtgtatcttttgtagagatgggttttcaccatgttgcctaggctggtcactagctcctgggctcaagggttctgctacttcagccccctaaagtgctaggattacaaatgtgagctgcctcatccagcctaatttaaattttaaatgcaacatctgggtagaggttactgtattggacggtgtcttcaaaggcgaacagaaggaaaagaaaacaagtggtagaactgtttgtgtgctacaacatggtgctgatacaggtttctgcaaaaattctgcttaatagtttccagcagttactctttccttttcatttggtcaaaagtgtgagttagggaagtaaaactggaaattaaaatcttccaataaatctagaattatttatactatgatttctccctgccctgtgttaagagactacactgtctctcgtcctcaggatacttgagaaaagagcaaagatgaaaataccacaagcttatgatgctgtacttatctttgaatttgtagatttctcctcttcaccatctacaaatggaatgttcaccctaactaccaatggggacctacccaaaccaatattcatccccaatggaatgccaaacactgttgtgccatgtggaactgagaagaacttcacaaatggaatggttaatggtcacatgccatctcttcctgacagcccctttacaggttacatcattgcagtccaccgaaaaatggttagttaaatgttaggcaactcactgccagtcttgctagtgtcatttgtgaaatagccattttctgtctttgcaacatcattgaatgcattttcttctcttttttctttaatttttaaaaatttaatacttttacaaattttatttttttacttttctatcctgtcctcaaaacctgttgctatgaatgtattttcaatgtattatatatgctaatataagtgatcagagccaggatttagtattattcatgatggctaatgtatgaaatgacattcctcatccgtatattaagaggcaacaggatagtcagcacatctgagtactactttctttaaaaatttgtgtctcctggccaggtgcagtggctcacacctgtaatcccagcactttgggaggctgaagcaggtggatcacctgaggtcaggagttcgagaacagcctggccaacatggtgaaatcccatctctactaaaaatacaaaaattagctgggcatggtggcatgcgcctgtagtttcagctacttgagaggctgaggcaggagaattgcttgaacccaggaggcagaggttgcagtgagcgaagattgtgccacagcactccagcctgggtggtaaagcgagacttcatctcaaaaaaaaacaaaaacaaaaacaaaaacaaagtatctcctaagccagacatgtttaggaggatcccttgaggacaggattttgaagctataatatgctatgatgctcacacctgtaaataaccactcaactccaacctgggcaataagtgagaccttgtctctaaaaaaattagaaaaaaacaaaaaccaacacacacaaaatttatgtttcctgtgtgtttatgtaggtatgtacatcttcactgccacataaacgcggatggctttggaaaagttttttgttttgggttttgttttttttttcttagaggacacaagaatgttcttcggcaaaatcaagttgtgcataattcctttcttgatagtctaatatataactattgcattaaaggttgactctttggtaaaaaagaaaaaggaaggtttgaaaactgtggtcagtggataattgttaaagaggtagtcttcgggtatagtggcaacttggtagagtagaaagggcactgaactaggaatttagcaacctatgttttagttctaattctgccactagatagctgattgagctctttggactttagtgtcctaattttataaaggaaaggaaaggtcaggtgcaatggctcatgcctgtaatcccagcactttgggaggctgagacaggtggatcatgaggtcaagagtttgagaccagcctggccaatatggtgaaaccccgtctctattaaaaatacaacaatcagccaggcatggtggcacacgactgtagtcccagctactcaggaggctgaggcaggagaatcgcttgaacctgggaggtggaggttgctgtgagctgagattgtgccattgcactccaacctgggcaacaagagcgaaactccgtctaaaaaaataaataaataaataaataaataaataaataaataaataaaataaagtaaaggaaattagggcttctagatcaagtaaattgattgtatagcagcaacaagagaaaatgaagttgtaaaaaaggtactactgtattggtttcttaggactgttataacaaattaccataaatttggtggctttaaacaacagaaatatatcttttttttttttttttgacagagtctcgctctgtcacccaggctggagtgcagtggtgcaatctcggttcactgcagcctccacctcctgggttcaagcaattctcctgcctcagcctcccgagtagctaggactacaggcacacgccaccatgcctggctaatttttgtatttttagtagagatggggtttcaccatgttggccaggatggtcttgatctcctgacctcgtgatctgcctgcctcgccctcccgaagtgctgggtttacaggtgtgaaccactgcacccagcccagaaatttattctttcaccttctggaggccagaagtctgaaaccaaggtttcagtagggtgggggcttcctccaaaggttctaggagagaatgctttcttgtctcttctaacctctggtggctccaggcattctttggcttgtgactacataactgcaatccctgcctcttcacatggccttctccttctctctgtctttctctgataaggatacttatcactgaatttagggcccacccagataatccaggatgatcttatcttgacatcctcaacttaattatatctacaaacatccttttaccaaattaggtcacatttactggttccaggggttagaacatggatatactgttttagggatgaccattcaactcaactacagatattatttatcttagtatcaaaaaaattaaatgctgagaaaaaaattaagtacctaggaataaactttaaaaatgacacataagacatctatatagaaaataaaatattgatagaaattaaagacttaaatattggaaggaataaaccatgttcatggattagaagactcgatattttaagatgtcagttctctacaaactaatctacagatgacttaatgcacaatcccaataaaaatgcaaagtctgcatgtgtgtgtgtgtgtgtgtgtgtgtgtgtgtgtggtgtgtgtgagttgataagctgattctcatatgtggaaatacaaagcacccagaatagccaagatactcttgaagaagaataaggtatgaggatatcatcaagattggatatcatccagatatcaagatttatttcacaaagatatgatacttaaaataatgtcacagtggtacaagaaaagacaaatagaccactgggatagaatagagagcccagaaaccagttcacaaatgtatgaacacctgatttataacaaagagaacattgcagggtggtgagagaaagttttctcagcaagtggtgctgggacaattagatatccatatgaaacttggcacctacctttcgccacaatttcaggtggtctatagagctaaatttgaaagcaaaacaatgaaacagcccttggaagataataatggtgaattcattcctgacattacgcatataaagaaaagattaaattgcacttcattaaaattgataacttggctgggtgcggtggctcatgcctataatcccagcactttgagaggccgagatgagacggacgggtcacaaggtcaggagttcaagaccagcctggccaatatggtgaaactccgtctctactaaaaatacaaaaattaactgggcatggtggtgggtgcatgtagtcccagctacttgggaggctgaggcaggagaatcgcttgaaccccagaggcagaggttgcagtgggctgagattacaccattgcattccagcctgggcaacagagcgagactccgtctcaaaaaaaaaaaaaaaagtgatcaatgacactagtaatcagtgaaatgtaaattaaaacaatattatgatatcagtgcactcacctgaacaggtaaaattaaacagactgacagggttgctaagtagagcaacaggaactctcataccatgctgatgagaatataaattaatacaactactttggaatacaattttctagttaaagataagcagttctacctgtaggtatccacccaaaagatatgtgtaccaggagagatgcacaagaatattcatagcagcattatctatagtagccccaaaatgaaaacattacatgtccattagttgtagaagggattgggaagttgagatatattaagataaaagaacattatacaggaatgaaaatgaatggatttgtagttatatccagtataaatgaatctcgtaaacctaatgttgatggaaagaagccagacaaaaaagaattagggtaggcacagtggctcacacccgtaatctcagcattttgggaggctgaggtgggctgattgcttgagcccaggagtttaagaccagcctgggcaacatggtgaaaccccatctctacagaaaatacagaaattagccggtgtggtgccacacacctgtagtcccagctactcaggaggctgaggcaagagaatctctcaagcccagaaagtggaggttgcagcaagctgagatcacaccactatgctccagcctcgatgacagagctagacccagtttcaaaaaacaaacaaaaaaaatgaattaagtaattctatttataaatataaaaacttttaaaacagggaaaatgaaatctagtgtttatttacttctgcataggatataaaactgtaaaggaaagcaagaaagtgattactgtaacatttagaataatagttacctttgtgaggaagggagaatttgtgatttggaggaagcaaatgggaggcttttgagtgctcactatattctgtttcttaaactcagtgataacagaaagctagttgctttgtgataattatttgaaatgtacttttttttgtttttgcaatggagtttcgctcttgttgcccaggctggagtgcagtggcacgatctcaactcaccgcaacctccgcctcctgtgttcaagtgattctcctgcctcggcctcccgagtagctgggattacaggcatgcgccaccacgcccggctaattttgtatttttagtagagacagggtctctctatgttggttaggttggtcttgaactcccgacctcaggtgatccacccaccttggcctcccaaagtgctggaattacaggcatgagccaccgcatccagccagaaatgtacccttttacctctgatttttatttttctctgaattagtagccgttggcttaaagttcctttctttttcttttttttttgagacagattcttgctgttgttgcccaggctggagtgcaatggcacgatctcggctcactgtactctctgcctcctgggttcaagtgattctcctgcctcagcctcccaagtagctgggactacaggcgcgtgccaccatgcccagataatttatgtatttttagtagagacagggtttcaccgtattggccaggctggtctcgcactcctgacctcatgatctgcctgcctcggcctcccgaagtgctgggattataggcatgagccactgcacctggccctggcttgaagtttctaaccatgttaataactgggagtagaatttatctcagtagtaactgagaaagtatgggccctagggcactaggagaaattccttaatgagaggatgaaaattgtgtgggtttagctatgttttaaaattttgtgaaatatttgtactgaactctgtctggatttctctgggtctcataataatagtaacatatgaaatagggtcttaaaattatgtatttaagcttaaatgaaaatggcaaaataaaatgcttaataatctgaataaagaagggtctttttacttagaaactagctaacttaacccttagtgagttgataagttgttgatttagcttttctaattactcaataaataccaaacttcttagagaattaaatattcaaaggttcagcagctttggataaccttgaactcccaccaaccattccattatactaaatgtttattaaacagccatttccaggataattctgtgcagtatctctatattaaggaatatcataaatgtctctttaacatactcaaagcaaatttttaaaatttttaccttacttttatcctatcctgtatttaaaaaacaaacaaaaaggattaaaatcacttaactgcttttaggaaggtggataagcttgttacaaaatagaattactaggtttcacaaatctccaaaactttgggaattgccactccaacaaccactatcgacagtttatccctagaaaactatagttgagatagtctttttttttttccccccactggcatcttttcatttctttttctgagacaggtctcactctaccttccaggctggaatgtagtggcacgatcacagatcactgtaccaaacttgccagactcaagcaatcctcccacctcagcctcctgtataggtgggactacagacacatgccaccatgcccagctaattgtatttatttctttatagagatggggtctccctaca[133 bp omitted]ttgtttaaaagcctttagctatgaagctattactagtttttacatgtgattcagtgtatgtgagaaatgtttatcagagaaaactctggtttgaatatattgattgctgaaacccaagtttgatagaataggcaacaactctaaaactggcaatacctcagcgcttttaatgactccactgtaaaccgttctctttgtgtcaataaagatggttttataaacatagagaagaatgtgatagtgactaatttgaaatggtgataatgcctatcattggcagagttagaagaactaaagggaggaatcagaggcctgtcttctcaactctctattctcgtttgtacatacagatgaggacagaactgtatttcctgtcacctcaggagaatcgccccagcctctttggaatgccattgattgttccatgcactgtgcatacccggaagaaagacctatatgatgcggtttggattcaagtatcctggttagcaagaccactcccacctcaggaagctagtattcatgcccaggatcggtgagttcaggggatccatctaaacctgtggtttccaaactctagaaaaataatttatatgaattctacatgacagatagggcccagcccatgtcaagtttggcgcccagccaaaataagttatttaaataattatttaaagtatttattttaaataaatactttattttggaagaaccactcagagagcatacaattcaaccatttggcttgatatttggagtaggagggacaatacagcttccttttgccaaacattctagtgtctaataatccttccattctctaatcttttgcctggattcgtcctgctaatgcttcaagtaatatccttgtcttctgtgttgcagaagtagagagtatgaattcaccaggaaatgtgtataatctcagtcctctgaaattcagaatgagagcgactgcatacatgaactctgaaaagtctcatgatacaaaaaataattctgttggattatttccataccatgtcattcttttttctttttcccttaccatgtcattttaacgtgaagtaatttcataaatctagataaaaataattaacattttctgttttctttccctttttcctaccactgttctatttgattagtaaatgcatttactctgaataatttttgggattgtgatgatgtcttatttttatctcaatcaaattgtagatcattttcttttcttttttttttttcttttctttatgacagagttttgctcttgttgcccaggttggagtgcaatggcacgatcctggctcactgcaacctccacctcccgggttcaaacgattctcctgcctcagcctcctgagtagctgggatacaggcatgcaccaccatgcctggctaattttgtttttttggtagagatggggtttctccatgttggtcaggctggtctcaaattcccaacctcaggtgatccgcctgcctcagcctcccaaagtgcggggattacaggcgtgagccacctcacccagcctgtagatcattttcttgccatcatggtacaaatgagagttctgttttatggtaactaaaaaaagttctttacttatttgttatgatgtggggtcttttgatgattagggtagggcttaggataaatacatcttttttttttttttgagacattcttaatttgtcacccaggctggaatgcagtggtgtgattttggttcactgcaaactccgcctccaggttcaagtgattttcatgcctcagacacctgagtagctgggattacagatgctcgcaaccacacccagctaatttttgtatttttagtagagactgggtttcaccatgttggccaggctgatctcaaactcctggcctcaagtgatccatctacctcagcctcccaaagtactggtattacaggtgtgagccaccacacctggccagatttaaatttaaagatttaaataaatctttacttaaataagttatttatttatttttattttgtatttttttgagacggagtctcgctctgtcacccaggctggagtgcagtggtgtgatcttggctcaacgcaacctccacctcccgggttcaagtgattctcctgcctcagcctcctgagtcgctgggattacaggtgcctgccaccacgcctggctagtttttgtattttcagtacaggcagggtttcaccaggttggccaggctggtctcaaactcctgacctcaagtgatctgcccgcctcagtctcccaaagtgctgggattacaggcatgagccatcgcgcccagccaaaataagttatttaaataattatttaaagtatttaagatttaaataaatcgtaaaggaaaactgcaaataatagataagcagtttagttaatgaatgttttgtttagtaaagatgaaagttggacaagattaaatttgaagtgaagtaattgaattaaaaagcttctagatgtgggcctttcccaggacttgctaatgaattggatgtggagtatagggaaagaggaatccaggctgacttcttttttctggttggcggggggcgggatggagtcttgctctgtcgccaggctggagtgcagtggcatgatctcagctcactgcacctctgcctcccaggttcaagcaattcttctgcctcagcctcccgagtagctgggagtacaggtgcacaccaccacactcggctaatttttgtatttttagtagagacagggtttcaccatgttggccaggatggtttcgatctcctgacctcatgatcccacctcagcctcccgaagtggtggaattacaggcgtgagccactgcacccggcccaggctggctttttaccctgaacaattgtttgtgaatggtggtaccatttaatggaaaaaggaaaactggagaaggagcagattttggcaagaaaagacaggaatcaagttaaattcaagaagtctattatatattcaagtgtaaaattaacttgaatgtcctctgctgaagatataaacatagatgtcatcaacaaataggtggtatttaaagccctgagaccagatgattaacatttagagagtgagatttaaatagagaagattcccatgatctatacatgaactctgaactgagttcatatgcattccgacatttagagattgaaaagggaaaaagaagcatcaaaagagatcgaggctgggtgcagtggctcatgcctgtagtcccagcacttcaggaggccgaggtgggaggatcacttgacgccaggagatcaagaccaacctgcccaacatggcaaaaccccgtctctactaaaaatgcaaaaattagctgggcatggtagtatgtgcctgtaatcccagatacttgggtggctgaggcatgagaatcacttcaaccctggaggtggaagttgcagtgagctgagatcacaccactgtactccagcctgggtgacagagcaagactctgtctcaaaagagagagagggagagagagagagagagagagagagggagagggggagagagagagagagagagagagagagagagagagagagagagagagagagagagagattgagaagaagcagcccgtaatgtaagaagaaaaccaggagttaagtgaaggaagtacttcaagaaaggagtgatagttgtttcaaatgctacagaggactgggaattgcccactggatttgataaaatggtctttggtgatctttgtgaaagctattttagtatagataaaggagtagagattggagtgggttaaagacagaacggtcctttggacgttaagaaaggtagccaggcatggtagctctcacctgattctagtggtacttggtaaagttatggatgaaataagagtggcctggagttgatgatttttatagttgtgtaaagaatacatggggtatttcattgcatagttctcaacttcttgagtgtttatgtcaataaatttgaaattttagattaaatggacaaaatcctggaattaagggtctatgtagaagagtgattattttcagggacagtgggtaaagaggcaagtgaggatttcagggcagcgattggaggtttctcttgggtgaaagaatcattagaatagggatgtttgaataagtagtaagtaacccaaaaagataggaggttgtggttgcaaagtaggataccgggaattgagattttggaggtagaaaagtttgtattcacaaggtctagaatatgacatttggagagggtttacatatggggtggaggaagttattgttggaagagagaagaccaagttactgttgtattaattgcattgatgctgatgtcaccaagaataataacaggagaagtggtggagaaaaaacacagtgaactaggtgctgcaatctgtagtgagtaaagaagatatgtaccttccaaggaggaatagcaggtggcataattcagtagcacatgatacaaagaagctggaatgttttagaaaaggaaggaagaagagatcatgtacaagtggcataggaataaggaagagatctattttacctccaggttctggaacgtatgagaataaaaagttcagagggtagggtgtggtggctcaagcctgtaatcccagcactttaggaggctgaggcaggaggatcacttgagcccaggagttcaagaccaggctggacaacatggcaaaatgctgtctttacaaaaaatgtaaaaattagccaggtatggtggtgcatgcctgtaatcctagctacttgggaggctgatgtgggaggatcacctgagcccagaaaggtggaggctgctatgagccataatcatgctactgcactccagcctgggcaacagagtgataccccgtctcaaaaaaaaaaaaaaaaaatggaaaaagtctgcagggggagcaggattctcaagaaagccaggcttcgttcagttagagcaaaaaggtaaaagaaatttttagaagagaagtgttgcacagctttctatgagagtgctacttgattgttttatcccattatctttcttttgattcctcacttattgctggcctgagttggacatggtactagacagtacaggctatcagtgatcattcactggatgagttatgcagaaagatgggaactcttatgccagatgtgattctcacttttgcccttacagtgactctttatcatggtttcattaccttcaatagcccatgtaataaccactatcatttgccagatgagctgtaaagtatgccactcttatgttatattccttgcattgcttccttctcccccacccccagctttattgaactataattgacaagtaggaattgtatatacatctaagacatacagcttatatttcgataatatgtataaattgttgcactgctccttgttagggcaaggatgagtaaatttttttaaaagttggaaaattcacaaggccatcttgacataatcattggcagttaaaagaagttactccatggtgtatatgtgccacattttcttaatccagtctgttgttgttggacatttggcttggttccaagtctttgctattgtgaatagtgctgcaataaacacacgtgtgcatgtgtctttctagcagcatgatttataatcctttgggtatatacccagtaatgggattgctgggtcaaatggtatttctagttctagatccctgaggaatcgccacactgacttccacaatggttgagctagtttacagtcccaccaacagtgtaaaagtgttcctatttctccacatcctctccagcacctgttgtttcctgactttttaatgatcaccattctaactggtgtgagatgggtgcagcacaccaacatggcacatgtacacatatgtaactaacctgcatgttgtgcacatgtaccctaaagcttaaagtataataaaaaaaagaagttactccaaaaatggtatgtagcttataactctgagtagttaaggcagtacttagcatgtaccacatcagcaattctgattaaagaagacttctaaatatacagctttctgcaatgtgtcagtgttcttgtcatggaaagatctaattattttagtttaatgtgaattaaatcctctgatagaatgaaggataattggtatttgatttcatgattagcttaccttgtaaaattttcgtgggccacatggactcccttagagacatctggcagtctgtctacccttctgtaagcccagatagaggatgggaagccagagtgtatttggtactgggctgcagctaatggattagggtaagtaacattgagctgtcaacatgagcatactgctgtggcaaatgccccttcctaggattacttcaagagaagatgaaaaggagttggacctcgaaccagaaatgcttcttacactctttttgttctcttctgtttcagtgataactgtatgggctatcaatatccattcactctacgagttgtgcagaaagatgggaactcctgtgcttggtgcccacagtataggtaaagtgacctgcaaaagaattactttagtagaatttcagctttagatattatacaattttcctaagatttccaattttgagaagtaaatagtgaataatgagaaacttaagaactgtggctgggcaccatggctcaggcctgtaatcccatcactttgagaagccgaggcgggtggatcacctgagatcaggagtttgagaccagcctaacctggtaaaaccccatctctactaaaaatacaaaaattagtggggcatggtggtgtgtgcctgtaatcccagctccttgggagactgaggcaggagaatcacttgaacccaggaggcggagactgcagtgagccaaggttgcgccattgcactccagcctgggcaacaagagtgaaactctgtctcaaaaaaagtttttcacttccttttgaggtcaatagataagttttgcttttgagacttagctggttttataaactacagtccataccaaattcataacttgtgacaaacatttattactctataaattcacctctccttttttgttttgttttgttttgagatggagtctcgctgtgtcacccaggctggggtgcagtggctcaatcttggctcactgcaacctctgcctcccaggttcaagcaattctcctgcctcagcctcccgagtagctgggactacagttgcacaccactgtacccagctaatttctgcatttttagtaggaatggggttttgccatgttaaactggtctcgaactcctgacctcaggtgatccacccacctcagcctcccaaagtgctgggattacaggcatgagacaccatgcccagcctctgtaaacttttatatgcatttatttaatctgccattttacaaacaaggagataggtgttataccagataaattgtcctacctcagagcattaaataactgaatttggaatttcttgcatgctgtagtatctcaaacagccaattcccatgtcatttatttgccataaagttcacatcttcctgtgattaacagatggttatcaagtactttgtaaaaataaagacttgaaaagtgaaaagcatgattccctgaaatgataataattattaataagtatccttacatttatcagagtctgaagttagaagcccatgacaaattgtgaggcccaagaggaaagcagaaaagtaggaagggagaatattttttattaagaaaatttaaattccttcataattatttcttcctctgtggatctttcccccctttttagattttgcagaggctgtaaaattgattgtggggaagacagagctttcattggaaatgcctatattgctgtggattggcaccccacagcccttcaccttcgctatcaaacatcccaggaaagggtaagaatttagggccaccgtaaaatggtggtttttatatgggaaatttcccccagtgtaactattatgccatttctgtttgacaatttaaaaacaaccagaaaaaccttcattggcatcctctatggcacctaatatattgacatgtttgcttgagctttttcattttccagcttctggagttcattgtattggggcattgtctttgtccattttgtgttgctataacagagtacgtgaggctggtaacttacaaagaaaagaggtttacttagcttactactattcggcagcctgggaagttcaaggacatggtcctggcttctggcaaagacttctgtgctgcatcataacatggcagagaagagcaaaggagaacagacacaggcaagagggaggaccaaacaggaggaagatcctcgctttctaacagcccgctctcttggaaactaagttctcagaagagaactcactactgcaagaatggcaccaaccatttatgagagtttcacccctgtgaccgaaacacctcctactaggccccacctcctaacaacgccacattgggaatcaaatttcaacatgcattttggtggagacaaaccatatccaaactatagcaggcattaaatttcaaaaatattaataagtgaatcttgaaacaaaactgtgtctggccatgacatatcaataagcatctctctgttaaatattatcgaagttgcagcatttggtaaccaggtaaccacagttacttagttcaagtgtgtcccagggctgtagctgctccctttaataggcagagtgatcagaacagttagagaaaggattgaaatgtttccattttgggtacctaagagcacatctcaatggccgctcttcacacttcacattcttctattgtcgctgtctggccagagcaatttttaaattttgaaaatgttgcttcagaaataattttaattccatacctaaaaatgcttgcctcaggcagtttttaatcaaccaaatattatttgaaaggtaaagacattaagaatctgatggagaggtaaaagcaacagagtcaaaggagttccttaagtcacatgaggaattgtagtggtttttgcatttttatggctcttgatagttggaaatttcctttactagtttttaaagcattccctttggataagttaataatggtaactgacttttctgtcttgttatgctatggaggactggggaaactaccaattctagacctagtttcctatttagatcccaaaatatgccccacacaccgaggttcctgggagccctttctagccaggaataagtataatttgtggatacttgtcaaatgaaagatcactaggctaaagctaaagaaagctgaagagaaactaatgttctagatcatgctcactagcaaggagggaaaattttacgagttgatagattcataaatctttgttagcacaaaatctgacagggcattattctgacattactgtcaatgatgataaattatttggctctataaatctcttcctctttttaacaaatccagtgtgcaatcggaaaagctctttaggacatcctgcttataggaaacggcctacgtgacctgttaaatcttaccctacttccactttcagtgatgcacttaggataccatggaaacgaagggctgttgatgccttgctagggagtggggccatatgcctaatcggggctccactacatgtagggtttctgcatgtgcttagaaagtcatgtagacaaaagagatactgtggtttaaattgggattattgcccatatgctttatattttttattccagtgatttcccttttaggaatttatctgaggggagaatactctgtaattactccataatttgcaggcaaatatcatcatagcattttttaggagagtaaaaagttattaacaacttatatttgtctcacattagaggaatggttaaataaagcatggtgtattcattggataaaatataatgcagttgttgaaaatgattactaggagtttttgctaacatttatgggaacatgcttacgatatgtgaacattgttttaaaaacaagacataaagttgcatatactggaaataataccttcaatattgaaaaaaatactatttaggaaaaaggacagaagaaaatctgccaatattttgacagtgggttgcctttgtattaagaatataacaggattccctgcctttttacatttttctctgctttccaaaatttccacatgaatattatacctagtaatcagaaaaaaatagaggggcaatcactcttatcctttatatttctctcctgtttggacctcagattcctcagtagaaaatgaaactagatgccagcctgggcaatatgatgtcaccctgtctttacaaaaaatgcacaaattagccaggtgtggtggtgtgcacctatagtcccagctgcttgggaggctgaggatggaggattgcttgagcccaagagatcaaggctgcagtgagctgtgatctcgccagtgcactccagcctgggtaacaaagcaagaccctgtctcaaaacaaaacaaaacaaaacaaaaacaaaaaagaaaaaaaaattaaactagacaaattcttaggcctctctctttaatagtcttatatgaaaactattacttcatttcctgtgttttgtgttaaagatgagctttaaagcaactctgaaaaagaagagggttcctataggtaatttatagactatttaaacagtagtagaggatctaagcatagatcccaagaggtaaagggaatctttatcactttgggaacttttactgataaatagaaattactgtcagtacagtccacaaatatgttgtttatcagccatctttcctccctgtcttcctctagcactgtagcctgtgttccccagaaaatatggtcaataaaattcaacattctttactagcttactctcatttgtggttggccataaagtattcctggtagagataatagagataatgtttaactggccatgagaaaggaaacactatcgtatatgatacacccctttttctactcattccaacaacgatgatacagcacgtttccttttgaagcacgtgttttttccttgagtgaccagttcaaaagatgatgacagttaatatcttgttactacagaatttgtactcaaaaaagaagtctataacccaagtccaagccagatttccttttctaaaaaaagaattttcctctaagttcccctttttaaatgagctctttagcctgggtagttatgcagtgctagaaccgtaactgcatgatcaaacccaaccttgctagtttataacagcatttgacagcctcgtgactctcatgtagggaaaaagtctcgcctgaaaacccatgctaagctgaatgtcttgagctgtgccaatttgtattccaggcagcctaaggttcccatcatgagtttcaggaagggaaattcatggaggaagttcacctctggaagggaggagcaataaatagggtgggtgatggacatatgtgacatttgccacagagaggcagtcagtgtgggccttgtggtccgggctgtgctttgggacacaaatatatactgtgtgaagtcttaacggtagcattcataaccctgatgcttcacccaccttcccatacattagagggacaaacagaaggatcccagctctatggttcttgattgtttgtcaggtagcagccaggcatggagagggaaaaattctttctcttctgctgcattctagatccttccttctctccttcttcattctacaccacccccaacatacatccctgcaccccgcccattctttgctctctctcctttcttacacttgactccttcttgctccacagcctaacatgctgattaacaggaccccaaaggtttgggtgggtattagaggccttctcaacaaaagcagcacactcttgagcttgttcttccttttgttgccatctcagataaaaaggccccatgagggaggagacagataattatagacttggtattctgataactctgtgttacatgggatcagatgcaaatgagttgtaccctgtggtgtttcatgctctgctgtgttgtcttctcatggtgagcttttctgtgccctcatttcatccagctctggtttctgtgtttcatgttatttctcctagcctcgtaaactctgcagcatactaataatgctctggctttctgattaaaaataaatggcttactatcagcacccctggcttgagggccagctcacatgtaaccccttataggattccaaagttgttaaataaattcaattctttttgtttttgtcattttgaagcattcaaaaatctttcaagaaaagttatggtcatataaacagaaattttatccagaatgttactgatgtaacatttgtgaataaatgtgtaggtgttgtatttgctcggactctagtttgggttgtgttttcttttccctttttttgagacaaggtctctctctgtcatccgggctggagtgcagtggcgtaatcacagctcactgcaacctctacctcccagactcaagcaatcctcctgagtagctgggactacagacatgcgccacaatgcccagctaatttttagatttttcttttactgagacagggtctcactctgttggccaggctggttttgaactcctggactcaagcgattccccccacctcggcctcctaaagtgctaggattacaggcctgagccatcatacccagccagttgtattttctttttccttataaagagtaaaataagggtgagtgaccgagcggttgatgcatagctagatcaccagtttaaatgccttcccacacacccctttcctcctgttccctctacctacaggttgtagataagcatgagagtgtggagcagagtcggcgagcgcaagccgagcccatcaacctggacagctgtctccgtgctttcaccagtgaggaagagctaggggaaagtgagatgtactactgttccaagtgtaagacccactgcttagcaacaaagaagctggatctctggaggcttccacccttcctggtatgttacggtcctgcctctgagagagcaggaatctagcataaaagaaagaagacatgaacaaacaggaggttttgttatttttgagaataagacttttcctgcagcagtgtttaaaacacattctgtacaaggtttttatgttgaatacagagatgaatctttctacaaatatttggtagttccttttcctaaaaagctcataacctagaagaagagatcaatcatgtagcccagtaactgcaattcagtgcgatgtgagaactgccacaaggggtacaacgtggtgaatgtgaacttcaggagagggtgaacttctggctctgtggagagaggaagcttaggctagccctttgtggactctagaagagcaactgagcccgggggcaatacccactgcacatagtcacgtggctgtggccacactgctgagttgagcgcgtgtgcacaaggacgccagtgcactagggcctgtgtagaggcctttatgaaaccatatttttgaagtctttaaaaaataatgaagagtaaatgttctgttatatatttccaaacattcacatgtatttgacttgttttttccatgtaaattttgtatcttcagaaccctttaatgcgatgttttctacctttacttctccagattattcaccttaagcgatttcaatttgtaaatgatcagtggataaaatcacagaaaattgtcagatttcttcgggaaagttttgatccgagtgcttttttggtaccacgagacccggccctctgccagcataaaccactcacaccccagggggatgagctctccaagcccaggattctggcaagagaggtgaagaaagtggatgcgcagagttcggctggaaaagaggacatgctcctaagcaaaagcccatcctcactcagcgctaacatcagcagcagcccaaaaggtgaggcctgggggccttatgcagttgctttcttgggactcctgtaggctacatatgtttctctgtcttctgttctggaacatcaggttggttgggtggaaggaacctatctggaatcagacctatctgtatttgagctatgtaagttgtagcaagagattcagcctccctgaatctatttcctcatctgtaaaatggagataatgccaggtttacagagttgagagtttgacacatggagagtaaagcacttcacacagtgcctgatgtatggtaaacaggaatggtagctgctgtcttgtccccttatagtgaaagttctgaggttccccatctttcagggggtctagaggatcaaaactccttttttatttatttattttattttttgtttttttgagacagggtctcactctgtcacccaggctggagtgcagtggtgcaacacagatcacagctcactgcagcctggacctcctggggtcaatcaatcctcccacctcagcttcctgagtagctgggactacaggcatgcaccactgcacctggctaatttttgtattttttgtagagatggtgcttcgccatgtttcccaggctgggctcgaactcctgcacccaagtgaacctcctgcttcggcctcctaaagtgctgggattacaggtgtgagccactgtgcctggcccaaaatgattttcataaaaatactgagaaaatatgtgctttttcactttttttctctcacagatgtacaatggtgtaagagaaaacatgacatggaataatatcgtcactttgacagtgaagtctgtgctaatgtattgtactttttcattcctcagttttaatttctaatacaggaaatattgatagataaaattcacataaaagttctaaaggttctcaataatttttaaaggtataaaagggggtaggggtaagaggctataactaaaaggtttaaagccttgcaggatttttgtgagacacagaggtaacaacggacagcaggaaattcccagtaccatgcctaacaataggaagtactcagtaaatggtggtcacattttttgtctaattttacaaaggagaggaatatgtatttggaaaactccttactctaatagttggatttttttcaactgaatcatcataaatcataatcatctttctgctgttttctgagtccctataatgcactttacattttcaggacattgttgcttatagggacttggcattgaagaagacaaaaatgtaacttactggctacacaataggaaccaaagggtagccagtcatgactcccctgtctttacctttgtgtgtacagttgcaaagctaacctcggagttagcatttggggctggcttactttctggcatttggatttgtgaatcttttcttctgtcctgttcacaggttctccttcttcatcaagaaaaagtggaaccagctgtccctccagcaaaaacagcagccctaatagcagcccacggactttggggaggagcaaagggaggctccggctgccccagattggcagcaaaaataagccgtcaagtagtaagaagaacttggatgccagcaaagagaatggggctgggcagatctgtgagctggctgacgccttgagccgagggcatatgcgggggggcagccaaccagagctggtcactcctcaggaccatgaggtagctttggccaatggattcctttatgagcatgaagcatgtggcaatggctgtggcgatggctacagcaatggtcagcttggaaaccacagtgaagaagacagcactgatgaccaaagagaagacactcatattaagcctatttataatctatatgcaatttcagtaagtggtttattatacggttttcagagagtggtctgtgttttgttcacttgtcttcatgtattcatcagcaagtatttttcaggtcctgctaatttcctagcattgagcttagtgatagacaaagttaacattgaaatctgggctcacagatgtggtgtggtggctcacacctgtaatcccagcactttagaaggctgagacaggaggatcgcttgagcccaggagtttgagaccagctgcttgggccccgtctctacaaataattttaaaatggagcgaggtatggtggcatgtgcctgtggtcccagctacttgaaaggctgaggcagaaggatcacctgagcccagaaggtcaagtctttagagagttgtgatcactcgactgcaccccagcctgggtgatagagcaagcccctgtctcaaaataataataataataatagtaattacaattataaaatgattgtttatccacacaagacttggagcttatgacttttgtattttgctttttgcttattttggttttagagaaagagggttctaaaatattttctcacctattgatcatttacatgatcagtgttctcctgctcagatcttagtgctataccctggccatagtacagttaactactaacatacctccactctcttatctcttacagtgccattcaggaattctgagtgggggccattacatcacttatgccaaaaacccaaactgcaagtggtactgttataatgacagcagctgtgaggtaaacattctcaatctttgaatgaaagttagaatatcaacagaactggggaacatttgttgaaataatggactatctcttgaataggaaatagatatttctgttagaattaatatatagatgctgtcagtattaaaggaacaaaagtgatatgcagagcagggaatgaaaacatgagtagtgaggaaaaataaagagttagttgaccgggcgcagtggctcatgcctgtaatcccagcactttgggaggctgaggcaggcttaggaggtggatcacttgatgtcaggagttcgagaccagactggccaacatggtgaaaccccatctctactaaaaatacaaaaattagttgggcatgttggcgcatgcctgtaatcccagctactcgggaggctgaggcaggagaatggcttgaacctgggaggtgaaggttgcagtgagccaagactgcaccactgcactccagcccgagcaacagagcaaggctctgtctcaaaaaaaaaaaaaaaaagtagttagttaatgcaaaaagctcctatcttctagactgttagaatttgatggggttgggccgagcgcggtggctcatgcctataatcccagcactttgggaggccaaggtgggcggatcatgaggtcaggagatagaggccatcctggctaatatggtgaaaccccatctctactaaaactacaaaaaattagccagatgtggtggcacatgcctgtagtcccagctgctcgggaggctgaggcaggagaatcgcttgaacccgggaggcagaggttgcagtgagctgagattgcaccagtgcacaccagcctggtgacagagcgagactccatctcaaaaaaataaatacatacaaaataaataattagaatttgatggggttttaggtcattctgttttgacttgtctatggtcaaaatattttccccaaagcaaacattggaaataatggggctcattttaaaggggcaggtgtgagacagccaaactagtgagcttattggaagcaatcaggttagtaattacagagggttggtcttccctttcctggcaaggatttagagtcataatagtgatggctttttgttaaaggtttttcttgccctttcaggaacttcaccctgatgaaattgacaccgactctgcctacattcttttctatgagcagcaggggatagactacgcacaatttctgccaaagattgatggcaaaaagatggcagacacaagcagtacggatgaagactctgagtctgattacgaaaagtactctatgttacagtaaagctaccactctggctgctagacagcttggtggcgagggagatgactccttgtagctgatacttggcaaaagtgtcactgaaagacaagctaaatgtagttattttatcctgttagaacaaaaattctaattaaaatagttaacttgaagagtagaaacaattgtattttgaagtctcatacaagctgtctgatagagaactttcaggcagatcccaccattagcctgtaaacaaaaggtgtggcaccagccacctgggaccaaataagaattgaattgtgcttgtccagatatgaacaaatatgtagtgagtatagagtttaccaataatcataacaaatattaaagatttccttggagtcagaggaaaaaacaaacaattataatgttgtctagggacgacatgatacgctacctcctttttcctgaagttttattccattatattgacaagatggagaaagcaagatcatgaaggtgtgcaaatgattcttacggcatggacaaggatttttcaatttattttttaaactgtttccataccctttctttttcttgctttttgtttttgccattgtgtttacgtttgagacacaaccagtcattggtggcaggggcatagagtggtcagtctgaaagggaggctctcttaagagctatgtgccttccaaccagagggagacccagtagaaagaaaaacatcctgggaaatccagctaccagggccctcccagtggaggcatcttacatttaggctacttcaagtatcctcagaaatgtattctgcacccccggccccgcccatgctgagggaaggggagcagttgccaatatttgcaccatcttcacatgcacatgttgcaacaagagcttctgggaaggtaagcggcatcggagctagatcacgtttcacaattagtggttattcttttctgtgtttgttttgcactttaaaaaagagagaacacatgcaaatgaacttgcttgtgtgtatttgatggctctaagggctataaattacaaacaaaacacatcccagacattaggagttcataagtatatttaatgaaattggtggttttaggaagtcaactttagttttgctttgtttgcatgtccactggtttttttattttgatatttgtctttttttaaattttacagtagtcattgaaagttatgtttctttgcttacttcattttttccctctaattatttaagattggaacaaaagtataaatattatttatttgaggtagaatttttttcatgtagtttcttaatatatacttgaaggaaatgtttcaccttatttttggtctttgtttattcatttagaccctgcaagttgattctcattgccagattccattaccctttcttcctcataggtagtaattaccaatgtaactaagcatttgtgttctgatatctgaggccagtaactattaatatctagttctcagagcatttggaaaggttatcttaaatggctacctaaattgaaatccttttcagaaaaaatataattgcaagtaggtaggagtggcctaaattgtctaatgtaataaagtcagacaaaatgcacactttatagtttcaagattttcagtaaataaaatctgtccattcctacctggacatgtcccattaaaaagtggaagattttaaataatttctttacagatgttttatttaaacaggtagcacaatctactaatgttgtgtgatttgtgttatactggttgtaattaatttttttaattcatgaactagcggaaaatttattaaattaactattaactacattcaccttgtaaattactgtataaaacttgttgacaatgcactgactttagaaagatgttaatgtacataaatagagtgtaaataaaatagtgttgatgtactgaaatatgaactgtatcaaaagtattggtaattgtatatggggtgtacctgtttatctgttaactattatccaaacaaattaaatactgtggttgcctctatgtgctgtttttcctcatacaagtaaacacagaaagtcaaattcttcagcctccctctctgtgatcctgttttaattctcctacttgaataatttctttctgacttgtatacagaggggatgcttcatctctgaggttggaaactctgtagagcaggattccccaactcctgggctacagaccagtactgtccatggcctgttaggaaccgggctgcacagcaggaggtgagtggcgagctgtatttatagccgctcccccttgctcccattaccgcctgagctctgcctcctgttagatcagcagcggcacgccattctcacaggagaaagaaccctattgtgaactgcgcatgctagcaatctaggttgtgtgctccttatgagaatctaatgcctgatgatttgaggtggaacagttttatcctgaaaccattccccccatccccccagtccgtggaaaaattgtcttccacaacacccatccctggtgccaaaaaggttggcaaccactgatgtagagggtagaacaagatctctccagtgaccaggtgactttaaacatggctcacatcccttttagaaagttatggcagggaagcaagtagagagcaggtggtaaactgaggattggtgcctacattggtacctacagtgggtcctacagtcatttttgtgcagatcaggagatgaggtgaagagaaggaaagcttctcatttgcataatgccttgaaatgaccctaggtttctagcgggcaccgagaaaccagagatgccccttgttgtctgtctgggagatccaaggagacatctggcagtgttgagaagagatgaaggtgacagctgtaggtccttcaccctcagcttctatttgttcacctataaagttaaaatacggaacactcaggcttgtaagaattaaatgaaggacacaaaccctggcacagttgcttggtaagtgctcaatccaacgatattcaatcctatttcacaaagagggattttttgtttgttttgttgtttgtttctttacctccttgctacaccgacgctaaaagagtttaatagtactctgttcacattttccaaaaacaagaatacacattaaaaatgtataaaatgggccaggcccagtggcttacacctgtaatcccagcactttggaaggccaaggcaggcggatcacctaaggttgagagttccaggccagcctgaccaatatggagaaaccccgtctctactaaaaatacaaaattagccaggcatggtggtgcatgcctgtaatcccagctacttgggaggctgaagcaggagaattgcttgaacccgggaggcagaggttgc[131 bp omitted]acaaacaaacagaaaattaatacggaaagtcaaaaaatgaagcacaactcttttaagtgccagtctgtttttaggtttcttctttttttttttttaaatagagacagggtctctgttgcacaaggatggagacacacaagcctggcatggctgtaggtgatacagggtggagacactgggaggtcaatgcggctgcagacacagggtttggaaacacctgatggaaaatgtgggctgtcagataaatccctgcttagagagaaatttacagccttaaaggagtatgttagaatagaaaaaaagattgacagtcaatcacataaactcccttctcaagaattaaaaacgatcaaaatgaaagaatgagaaagtaataaagagcagacatcaatgaaataggaaaaaaaaagcaacagaaacaaatcaaggataaaagttggtttatagggttgggcgcagaggctcacacctgtaatcccagcactttgagaggccgaggcaggcggatcacgaggtcaggagatcaagaccatcctggctaacacagtgaaaccccgtctctactaaaaaatacaaaaaattagccaggcggggtggcgggtgcctgtagtcccagctactcggcaggctgaggcaggagaatggcctgaaccagggaggcggcgcttgcagtgagccgagatcgcaccactgcactccagcatgggcaacacagtgagtctctgtctcataaaaaaaaaaaaaaaagttggtttataaatattaatacacttaagaaaccactagtgaaaccaactgaggcaaagaggaaagacacagaaaaccaatatccggaaccaaaacaaaagcctgttccatagagcagtgtattaagacactaggagggttcggtgaaatacttaggactacaagtttgacaac[135 bp omitted]aacatgctgaaaacccgtctctactaaaaaatacagccgggcactgtggctcacacctgtaatactagcactttgggaggctgaggcaggtggatcacgaggtcaggagttcgagaccagcctggccaacatagtgaaaccccgtgtctactagaaacacaaaaattagccggggtggtggcacgcacctgtaactccagctactcaggaggctgaggctggagaattgcttgaatccaggaggcggaagttgcagtgagccgagattgcgccactgcactctagcctgggagacagagtgagactctgtcccccaaaaaataaaaataaaaataaacttactaaaacggacacagaaataacataaaacaagaaaactcctacatataccgaaggatttgaattattagaagtcaaaccagccaacaaaaatactgttccacaaggaaaattccatacctaaagaaatattccaaatatttaaggaagaaaacacctaaatttctcagactcttccaaagagaagaaatataggaaatatttttcagttttttttttttgtgaagccagcattactttgacaccacaatctgaacaggaccttagaaaaaaaaattataggcccactctttcattaacagaaatacaaatattctaaaaaaaaccatatcatatgaattaaaccacatatggaaatgtaacacatggataccaagtgggatatactaaaaaatgcaggattggttaacatccaaaaatagttcacataaaatatcctattttcagaaaaatacgagaaaaacatatgattatttacagtatatgtaaaaaaaagcatttattcaaattcaacaattagtcataaataactcttagcatatgtaaaagaaggcagcttccttaatctcattgtttgtctaaaatgaaattataataaactacataaggaatacaggatcactgaaacctgttccctggaatcagaaccagacacaccgtgttcaggaggtgtgatggggacaataaaagaagaaaataaagaaaaataaaggtgtaagaaccaacatttaagcaatataggtgttattatatgtggctgacactaactacataagtatgtaagtacgttaagtatttaagtacataagtacataactacatgtacataagtacatgaaaaacccaccacaatccaaaaatgatgcctatgaatatgtgaattaaaccaggtaacaagatacaaaatcaatatataaaatcaattagattcttatttaccagcaagaaagaaatgtgaaataaaattacggtacaatgaccagactaagaaacaactatctgcactagaaatgaccccataaaggattaatttatagaatacctttttaaattcttcaaatcaacataagaacacaaatgacccaacagaaaagccagcactgaaaatgaagacaaagacgcaaaggccaataaatattcacaaaacgtcgcttcactaacttatttccagttccagatgacaggaggccctcaaggacccagaaggcaggaccacagggaggtgacagcgccagcagcagcagggcaggcctctgccttggccacagctcctggcgggctgcaggggccgggaagcccgagcagcctggcgctcctggcccctgcacacacttccctccctccaccccgttcctctctctctctgtgccttgggccccctgggatgcgctcacatccagactcaccaggccggagacgttggcagaatggagaagtgctggctacaggtggatgatgcccacctggctgccaatgacttctgcaccaagcgaggctgggtctctggagctgcaccaggggctggacaagctgaccctggccggagccaacctggagatgcagcctgagaacctcaaggaggacctggtctacctgaagaagattcaacaatgactatctttcttcagccccatctaattacggcccctggcacatactaaacagtcactaagtaattcttaaataacttttatttcaacattcagttaaaaacattccatactgtaacaaaaatttcaatctttcaaaagtccaatacccttagtttgattcaagctccatcaaagatgaattggttagtttttaatctggagtttacaagtcatagttaatatttcaaaaagcctaacatagacgatatgtttgcccacaaaaggaataaaaagactaatgaaaatggtaaattatttgctttgggctggaattttagtacctaggtctgcctacatggtgccagtcagaagcatgatttgtgttgtacatgcctttatgtagcaaaatataattctttaataaatgcagtttggtaaacataatcttttaagacacaggacataggggagtaaaaagaaggccttggtgattaaaaagttggaaaccactgaattaaattaccttcaaatccctgtaagtatcctgtttatccttataaacattagctctcactgtacagcattgtaaagacaagcagaagagttagacttttttttttttttgagatggagtttcgcacttgttgcccaggctggagtgcagtggcatgatcttggctcaccgcaacctccacctcccaggttcaagtgattctcctgccctagcctcgcaagtacctgggactacaggcgtgccccaccatgcctggctaatttttgttatttttagtagagacggggttttagtatgttggctgggcatagtaactcctcatgatcaactcgtgacctcgtgatctgcccaccttggcttcccaaagtgctggattacaggtacgagccaccgcacctggcctacactcattactttcacagggttttttcccacatttaaacttgtcactcgactaggaagtcaagattgaaatggctctttccatgaataatttagttttggggttgttgccaaagtgatttataatgattttaataatgatagacatcccttaaaacattctcaagtaattagacccctggggctggtgcagtggctcatgccggtaatcccaaccctttgggaggctgaggagggaggagtgcttgagcccaagagttcaagtccagcctgggcaacatagtgagacctcatctctttgtatgttaaaaaataaataatttaaaaaattgtatcgttgggaccatattctagtgtcagttctgagacagaaaaaaaaaaggtgattatgtccaagagcttttggcttttccacttgattatacttacgtttgaaaaatccagtaggtattttctctgctttcccaccttcccatggtttttttctaataaaactcatttgtagtgcaataagatgtggtctccatcagacttttcctagttttactgcattcattaggtttctgctacctattagaataggtcctgtttgtagactcttacagtcttcaaattcctttccaatgtgaagtttctggtgcttaagaaaagctgtccacccactgaaggccttaccacagttgctacattcaaagggtttctctctggtatgaattctttgatgactgacaaggtgtgagttctgactgaaggccttccaacattcagggcattcatagggtttctctccagtatgaacacgatggtgtctaataagatctgagctgcccctaaaagatttcccacatttgttgcatacataaggtttttctccactgtgaattctatgatgtctcagaaggtctgagctctgattgaaagttttcccacattctttacattcatatggtttctctcctgtatgagttacctgatgtccgatgaggtctgagctgccctggaaagccctaccacactgattacaccaataagctttctcttcttggtgaattttctgctctcccctaagctcctcatccttgctgaaggttttctcacgttcttcaagtttctctccagcatgcagtctctgatgtttgaggaaagctgtgtgccacatgaagagtttcccacattccttacattcatagggtttctcaccactatgaattctccgacgttgaataaggagtgaacgccgcctgaaggctttttcacattcagtgcactgatagggcttctctccagtgtggattttctggtgtgtgacaaggtgggacctctggctaaagactttcccacattcactacattcatgaggtttctctccagtatgaacacgatggtgtttaataagatctgagctgctcctaaaagattccccacatttattgcatacgtaaggtttttctccactgtgaattctatgatgtctcagaaggtctgagctctgattgagttttcccacattctttacattcatatggtttctctcttgtatgagttacctgatgtctgatgagatctgagctgccctggaaggtcctactacactgattacaccaataaactttcttttcctggtgagttctctgctcttttctaagctcctcatccttgctgaaggttttctcacattcttcaagtttctctccagcatgcagtctctgatgtttgaggaaagccgtgtgccacatgaagagtttcccacattccttacattcatagggtttctcaccactatgaagtctccgatgttgaataaggagggaacgccgcctgaaggcattcccacattcactgcactgatagggtttctctccagtatggattttctggtgtgtagcaaggtgtgacctctggctgaaggctttcccacattcactacattcatagggtttctctccagtatgaatacgatggtgtttaataagatctgagctacccctaaaagatttcccacatttgttgcatacataaggtttttctccactgtgaattctatgatgtctcagaaggtctgagctctgattgaaagttttcccacattctttgcattcatatggtttctctcttgtatgagttacctgatgtctgatgaggtctgagctgccctggaaagccctaccacactgattacaccaataagctttcgcttcctggtgaattttctgctctcccctaagctcctcatcctggctgaaggttttctcacattcaagtttctctccagtatgcaggctctgatgtttgaggaaagctgtgcgccaaatgaagagcttcccacattccttacattcatagggtttctcaccactatgaattctccgatgttgaataaggagtgaacgccgcctgaaggctttcccacattcagtgcactgatagggcttctctccagtatggattttctggtgtgtaacaaggtgtgacctctggctaaaggctttcccacattcactacattcatagggtttctctccagtatgaacacgatggtgtctaataagatctgagctgcccctaaaagatttcccacatttgctacatacacaaggtttttctccactgtgaattctatgatgtctcagaaggtctgagctctgattgaaagttttcccacattctttacattcatatggtttctctcctgtatgagttacctgatgtctgatgaggtctgaggtgccctggaaattcctaccacactgattacaccaataagctttctcttcctggtgaattctctgctcttccctaagctcctcatccttgctgaaggttttctcacattcttcaattttctctccagcatgcaatctctgatgtttaagaaaagctgtgcgcccactgaaggtcttcccacatctgtgacattcatagggtttctctccactgtggagtctctggtgttcagtaaggtgagaatgctgcctgaaggctttttcacattcattacatttgaggggtttctctccagtgtgaattctctgatgtgggacaaggtgtgaactttgactgaacatctgtccacagtcataacattcatagggtttctctccagtgtgaattctgtgatgtataataagatctgtgctttgactgaaagccttcccacatttattgcataaatatggcttccccctactgtggattctctggtgcaggacaaggtttgagcttcccttaaaagccttcccacactctttgcactcatagggattcccaccactgtgaatttgcttatgtctcaccagattggagctctgattgaagtcttttccacattcatgacatatataaggtttctttcctgtatgaattctctgatgtataataagatttgaactttgattagagtctttcccacattcattacacacatatggcttatttcctgtatgaattctctgatgtatgatcaggtttgaactcctgttgaaggttttttcacattccttacattcataggtcttatttatattatgaattttctgatgttcagttaatcctgacttctgtttgaagttttggccactaacctcatatctatgggagctttctcctgcagaaagtattttttctccttcattacatccatggccaatctctcccacaatggctttctgggggataatatgcatttccctgataccgctctcttgggaagggagatgtctcattgcatcctttaaagggcttacccagtgcttcaataatctgtcctcagaattactggtttcaactaactcacattcctgggtgatttgtctttggagtttttcggatgcagcccttgctgacttcttttcttcagaaatttccatctttgatttccattccttcatcttattcctgtcttcagaatctgaaatgataagtagatcattctataattcctaaaatacaaatatcatctcttcattatactgggcagtctaagagggaggaacaaagaactcagaagacctttccctgccaaagctgagatgtggctttcactagcgacactgtggctaacacaggaacctgtgctaccacataccctgttggtgaaaaaacccgccagggtgcaggctggagctgggctgtgggagtggcctaaagggtggtgaattaattcactgggggaggagggcaatctggagttggtccacaggaagtggcctgttggatgggggaggaacttgctggatggtgtggctgggcctgaactggttcacaggaagcaacccactagggtaaatgccaccaggcctcccacaagttgatctgctagcagccacataagtaaataattaaaataaataaataaaaatagaacagcacaccggtaccaggaagttagtttctcttcccatggccacgcattgtccctccagcatcctctgttgacaaagtcaaatcttgtacgaactggcaaaggagaaatgtttacagaatccagctttgtaacaaaagcaaacaaagatgggtggatctggagttgagaggcaataaattaataaccagcatactgctctttcctccctatatatcatgatagttaagcaaatctgtactatgcctcagaataaaaacgtttggctgtcatttcaatagaaatcaattctcttcttctcagacctcacatttttctttctgatattctgatggaattgcctccttttgtgtggcaatttgatttcttctgaaattacaagatagatgagcttattgcttttgagggtccacgttatcaaatccctgaccttccccagtggattagtccgttttcatgctgctgataaagacatacctgagactggagagaaaaagaggtttagttggacttacagttccacatggctgggaaggcctcagaatcatggtgggaggtgaaaggcacatcttacatggtggtggcaagagaaaatgaggaagatgcaaaagcagaaacccctgataaaatcatcagatctcatgagacttattcactaccatgagaatagtaggggggaaactgcccccatgattcaaattatctcccaccatatccctcccacaaaacatgggatttatgggagtacaattcaagatgagacttgagtggggacacagagccaaaccatatcattctgcccctggcccctccaaatcttatgtcctcacatttcaaaaccaatcatgccttcccaacagtccccctaagtctcatctcatttcagcattaacccaaaagtccacagttcaaagtctcaacagaaacaaggcaagtcccttcctcctatgagcctgtaaaatcaaaagcaagctagttacttcctagatataatgggggtacaggtattgctgggtaaatacagctgttccaaatgggagaaattggccaaaacaaaggggttacagggcccatgcaagtccgaaatccagcaaggcaatcaaattttaaacctccaaaatgatctcctttgactccaggtctcacatccaggtcatgctgatgcaagaggtgggttcccatggtcttgggcaactccacccctgtggctttgtagggcacagcctccctcctggctgctttcacgggctggtgttgagtgtctgcagcttttccaggcatacggtgcaagctgtaggtggatctaccattctggggtctggaggtcattggccctcttctcacagctccactagaaggtgcccgagtagggactccatatggtggcttcgaccccacatttcccttctgcagtgccctagcagaggttctccatgagatccctgcccctgcagcaaacttctggctgggcatccaagcgtttccatacatcttctgaaatccaggtggaagttcccaaacctcaattcttgacttctgtgtacctaaagactcaacaccatgtggaaactgccaaggcttagggcaccctctgaagccacagcttgagctctatctacattggcccctttcagccatggctagagcggctgggatgcagcgcaccaagtccctaggctggacacagcattgggaccctgggcctggcccacaaaaccattttctcctaggcctccaggcctgtgatgggaggggctgctgtgaagacttctgacatgccctggagacattttccccattgtcttgcggattaacattcagcttcttgttacttatgcaaatttctgcagcctgattgaatttctcctcagaaaatgggtttttcttttctatcacattctcaggctgcaaattttctgaacttttatgctctgcttccctcataaaactgaatccatttaacaggacccaagtcacaccttgaatgttttgctgcttagaaatttcttccaccagataccctaaatcatctctctcaagttcaaagttccacaaatctctagggcagtggcaaaatgccaccagtgtctttgctaaaacataacaagagtcacctctgctccagttcccgacaagttcctcatctccatctgagaccacctcagcctggaccttattgtccataatgctgtcaggcctttggtcaaagccactcaacaagtctctagaagttccaaactttcccacattttcctgtcttcttctgagccccccagactgttccgacctttgcctgttctccagctccagaattgcttccacattttggatgtcttttcagcagcacccctggcaccaatttactgtattagtatgttttcatgctgctgatgaagacatacccgagactgggaagaaaaagaggtttaattggacttacagttccacatggtttgagaggcctcagaattatggcaggaggcaaaaggcacttcttacattgtggtggcaagagaaaatgaggaagatgcaaaagcggaaaccaatgataaaaccatcagatctcatgagacttattcactaccatgaaaacagtatgggggaaccacccccatgattcaaattatctcccaccaggtccctcccacaacatatgggaattatggaagtacaattcaagatgagatttgggtggggacacagagccaaaccatatcagtcagtcacaaaaacacatttctgagctccttgggagagtcattttattttggtcctgctgatagggactctagtcattaatcttcttggagtgaatgagcagcaacatggcacagtgattaacagcatggactgaaaggcaaactgcctgagtttgaaacctggctccaccacttaatgatggggaaacctcaggcaaatcactggagctctcagtgccctagcttcgtcatctataaaatggagataataatagtatttacctcatagagttgttatgagaatcaaatatatataaatacacataaaacatttagaacagtgctttgcatacagaaagcactatgtgtcagctgctgttattattactattaatacttaccctttaatattaagtaatgtgtccatagaacagacctccatatccaggctggatttccttttttttttttttttttagagatatggtctcaccatgttgcccaggctggtctcacactcctgggctcaggccatcctgccctggactcccaaagtgctgggattgcaggtgtgaggcactgcacctggccttggatttcatttaaataccataccctctcctgcaactgaaagacagtggccttactgcttttgggtgcccatattatcaaatccctgacctttattattggagagaattggctttgtcataattttcccttgaagtgtttagtgtttttttttttttttggttcgatatacatatatatatagagagagagagttcaaaattcaggagcagattactatttaaaagatagtagattaaaggctgccctttttttttttttttcacaaaaaacttgtgatctgaagggcttttattgtgtcatactgaagtcttgaaagccagaagctgaaggaaggtatgcctctagatttgatgaggcgtttgtggcagcaaatctgtatgaaggctttcaagtgcctgggctcaatttcctctgtttgttcccatagtactttttaataaagagcctgcttcattcattattgagtagtaattgttaagataaatttgtgggatgtatgcttaaaataaaaaaatacacattttcagggaagaataaaggaaagaaaggaacatcagcaacagaaacatacatccatgaagaatacaaagaaattaataggaaacattcagcagagaattctccattatctcaaagaaatttcagacaaaataactctttaaataaaagcctaaagaagagatataagggtttaaaacagattacacatttacatttaaaattttgactttttttttttttttgagatggagtcttgctctgttacccaggctggagtgcaatggcgcgatctcggctcactgcaagctccgcctcccgggttcacgccattctcctgcctcagcctcccgagtagctgggactacaggcgcccaccag[137 bp omitted]gcccagccaaaaatttgacatttttaatttaaaaaaaaatattgagtcatgtagccaaaaaaaaaaagaaaagagaaaggaaaaaataatagcaatggggcctcagtatactgcccaggctggtcttgaactcctggcttcaagtgatcctcccaccttggcctcccaaagtgctggggttataggtgtgagccactgtgccaggccatttttttttcacttttttttttggagacagggtctctgtcacccaggctggagtgcagtggtgtaatcatggttcactgcagccttgacctcccaggctgagatgattctcccacctcagcctcccaagtagctgggattacaggcatgctgcagcacacatggctaagtttttgtagagatggggcttgccgtgttgtccagggtgttctggaactcctggcctcaagggatcttcctgcctcagcctcccaaagtgctagcattacaggcgtgagccactgtgcccagcttgttttgtttttttcatacatgctctcattctgtcacccaggctggagtgcagtggtgcaatcatagctcactgcaacctcaaactcctgggctcaagcaatcctcccacttcagcctgacaccataggcacaccaccatacccagctagtttaaataatttttttgtagagaaaaggtcttgctatgttgcccaggcaggtctcaaactcctggcctcaagggattcttcagcctcccaaagtgctgagattacagacatgagccaccatgcctggccaaaaacaaattagattagaaaacaataaaaagtagtgagaagtgatttgacaatgctgaggaaagaaatggaagggcaaataaaaagcattatgtagatgaaattcacataaggaacaacaaaaataatcactacaaggtcacaatgaggcctggagaaataataaaaaatgaaatgaatacaaatgtgattacagagaaaaccagtaactaaagaaagataatcaaatacatataattagtgttcctaaagaaaagagcaaacacaggccgggcgcagtggctcacacctgtaattccagcactttgggaggctgaggcaggcagagtaccagaggttgggagttcgagaccagcctgaccaacatggagagaaatcctgtgtctactaaaaatacaaaattagctgggcgtggtggcacatgcctgtagtcccagctactcggaaggctgaggcaggagaatcgcttgaacctgggaggcggaggttgcagtgagccgagatcgcaccactgcactctagtctgttgacagagcgagactctgtcttaagaaaaaaaaggaagttggccattaattcaaataaaaacaaacagcatgagccaagaaaatgtgtctacactcaaagctggcctaggggccactattttttaacttaagaaatgccactatttcatgcccagttcttagtatcttttaactatgtcaatcctttttaattcacattcatgggcacgcattaggtgaagctaaacaaagaatctatgcctagaggaagactcacacatgaaacaaggtagtaagagcctatgaattagatgctaaaagcgctgcggtggcaatccgggaaggcttcccaaaagaaatgacttttgaagtgtgataccctactttgttttaacctgagtgactctctcctagcagagagagagccggacagactccattttagtttctccactggcagccccctttcacctccctcccttaaggcatagctagtgtaaactgactcaaagcacgtccaggaatgcacctactgataagatattgaggcaagctgcaccagcagctcctggggacgcgctcggtggatggcaagcaaaacccctgcatttatctctttgtgatagtttaagcccgtgcaattggaactgtttatattttgtaactgcatttgtaaccaattaatttttcaactttttgccagttctgcttctgtaaaaattgcttcagctaaaatcccccctcccctatttagaccacggtataaaaacaaaactagccccttcctcagggccgagaaaattttgggcgctagctgcctctcggttgccggctaataaggactctttaatttgtctcaaagtgtggcgtttctctgtaactcgcttggtcacaatagaagctgctcctaaaagcaatgtagacccttacaaagagaccagcccacctaaatccctcccttgtttgaactctaacagtcctaatattttagactgagtagtagaacatatatgaacaatacagttcattcctgtggcttagtctagcctccccagcggggtcactcgtgggatgcaaaaaccagatttggttacatatacaaatatacctggcacagatgtgggcgaggaataatcaatttatgcctgacggtggattctgggcctcgggaagatgccgttagcggtacccacaggagggaactggaacaggcaagagtagcgggacagggccgggaatggggcacgccgagaccaagaagccgaccgagagcaagaaggcccagtcatgcgcacccggcgcctacatcctcctgcggtcccccaggcctctccccataggcatatgagctctgctccactcctcgcttgccggtggacgcaggcgccgcggccgccagctctgtgaacgcagcggggtctcacctccaggctacccccaacctcccgctcggtcgggggcccctccacggccgctatcactgggtcgcggctcctagcgccaccatcttggaccccgcgcctgggccaggcgagaacttccggtgcgctccccgggactgcggtcccccagtccgcgccccgcccagccgtcccccgtcggctccagccaatccgcgcgcgctcccctggccgtctcccaccggatcaggtgtctcctctgcgcagactcctccacgacgccagtcggcgctggcgtagctcggctcagcccggcggagtctgacttccggagggccagcggcgcgctggctggttaccaaggttaccgccgagaggccgcgtcctcagctggtcctagacatgcgtggcgtcggggctgtggcacggtcgggtccggggtgagtgaccccttcaagtaactacgtttttgttctgcccttttgttttgtttttgagatggagtctcgctctttcgcccaggccggagtgcaatggcgcgatctcggctcactgcagcctccatctcccaggttcaagcgattctcctgcctcggcctccccagtagttgggattacaggcgcccaccaccacgccctgctaatttttgtatttttagtagagacggggtttcgccatgttggccaggctagtctcgaactcctgttctgcctgttctgttttcatcttttgttattgttccctgcatgcatttgtggtctcattcattgatgacttctatttgcaatgcccggtcaaaggctaggcgatacagatcccaacaaggacagcttaatgtttaaaagtgtaagttccgaagtgagaaagtcagacactcagaatccttgccccaccacttaggggctatgtgactttgaacaagttacctattaatagcttcttcgcgcctccgttgcttcatttgtaaagtgaggtaaataataggaccgacctcactgacatatgtatgtgaagtttgcatgtggcgaaggccagatacatattagttattactatggagatgatgttggttcgcgtagcgtaggatcgtggtaagggttatatatgtatgtaaagatgtaagatgtccaaccccaagcctttccgaagcaaaactgtcagtgcactagtcactttggcttctcatatctctctgtcccaaactttgggttgcacgaattatgcacgtttcactcttgaatttgtaaatgcagctactaccaactattccttaatttgcacaactacatttgagatagtatttcattgactgtgttacattttcattgaaatactgagccatgtctcaaatagacttcaattatagttgcttttatagttccttttgctttacctctcttaataagagtgcactaatagaagttactctttggaatttagaaatgggtttttaaggcagggcacggtggctcacacctgtaatcccagcactttgggaggcctaggaggccgcatcacttgagctcaggagttcaagaccagcctggccagcatggtgaaacccccgtctctactaaaaatgcaaaacaattaactggcatgatggcaggcgcctgtagttccagctactcgggaggctgaggcaggaaaatagcttgaacccgggaggtggaggttgcagtgagccgagatggaaccacttcactccagcctgggcaacagagcaagacactgtctcaaaaaaataaaaaaaaaaatagactgttccgtgtcctctgctcctagaggcccagcctctgtggccctgtgacctgcaagtattgagagatccacagctaagacaccgggatcctctgggaggcaaaaatgagttagaactcataagtgggagttgaacaatgagaacacatggatagagggtggggaacatcacataccagggctggtggggggtggggggctgggggagggatagcattaggagaaatacctaatgtaaatgacgagttgatgggtgcagcaaaccaacatggcacatgtatacctatgtaacaaacctgcacgttgtgcacatgtaccctataacttaaagtataacaaataaataaaataaaataaatgggtttaaaaaaaatcgtacaggctgggcgaggtggttcatgcctgtaatcctagcactttgggaggctgaggcgagtggatcacttgaggttaggagttcaagaccagcctggccaacatggtgaaactccgtctgtactaaaaaataaaaaaaataaaaaaaaattagccgcgcatggcagcatgagcctgtagtcccagctactagggaggctgaggcgggagagtggcgtgaacccaggaggcagagcttaagtaagccaagattttgccactgcactccagcctgggcgatagagcaagactccgtctcaaaaaaaaaataaaattatctggatgtcgtggtgcgtgcttgtagtctcagccacctgggagtctgaggcaggagaatcgcttgaattggagaagcggaggttgcagtgagccaagatcgcgccactgcactccaccctgggtgacagagcgagactcttctcaaaaaaaaagaaaagaaaaaagaaaaaagaagtggtgtagatcgtgaaagtattaaaagggaaaatatttgtaacatgcatgataggaaaagggataacatgcatgacataaaagagctccacatgacttcaggttccctgagagtgccttgggttttcctcaacattcactgtatcaccagtgcccggcacagagccagcactccatacatatttgtagaatgaataaattacataatgaatccatgctgctgtcaggggtagcatgtgaactctaaaggagatcaaaaagaagagctattctttttaagactaaaaagccaaaataaccacttttggcaagacttatatatttctcaataaaaaaatgcagctgctgtcttccccacacccactgcctcccattttcatttttctggcttatgcagatctcagttcttaaaataaatttttttaaactttattttgttattttaaaagtagtataagaattacaagaaaacattcgtacacatgtaaaatggttctgacgacaactaaccctgacagattttttttttttttttttttaagagacaaggtctcactctgtcagtggcatgatcatagctcactgcagcctcatcctcctgggctcaagtgatcctccagccttctgagtggctgggactacaggtactgccaccatgcctggctaattttgtttttagttttttgtagatatggggtctgcctagatcgaccaggctgttctggaactcctggcttcaagcaatcctgtcaccttagactcccagagtgctgggattacaagcatgagccaaacctgccaccactcctggcctaccagatttcttttcttttcttttctttttaactgagatgggaggctccactctgtggcccacgctggagtatggcggtgcaatcacaggtcagtgcagcttcaaactcccaggctgaaacaatcctcccacctcagcatcccaagtagctgagaccacaggtgcacaccacaacacccagaaaatgtttgtacttttggagaaactgagtctcactatgttgcccaggctagtcttgaactcctgggctcaagcaatcctcccatctcagcctcccaaacccaaactgctgggatttcaggcgtgagccaccgtgcccggtcttggagcttattttattttattttattttattttatttgagacagagtcttgctctgtcaccaggctggagtgcagtggtgtgatctcagctcactgcaacctctgcctcctgggttcaagcgattctcctgcctc[134 bp omitted]acctcccaaagtgctgggattacaggcatgagccactgagcctggccctctttactgtcttatgcggtcactcaacacaatacttctgacaccagatgggtgggggctttctccacatactgagcaattctctagcagacaccagatagctgtcctctaattcaattcaatctgacactatctacctggagatagtgttagatcccgcagtcccacaagactactgcccacttcagatgccaattgtaaactcttggctgtgacctgtatttctgacaaactggctctaaagtgaggttcccacaaatccctcctagggtttgccaggacagctcacagaactcagggaaacaccttacttatatttacccatttatgataaaggatattacaaaggatataggttaataaccagatggaagagatgcatagggcaaggtatgcagaaaggtgtgtggcacttccatgccctctctgagtgccatcctccaggaaccatccaccatcctccatgtgatcagctatctggaagctcctagaactctatcctttggggtttttatgaaggcttcattacataggcatgattgattaaatcattggccattggtgatgaactcaaccttcagcccctctccctcccctcccttggagatcctgccttgatctttttggcaactagcccccgtcctgaagttatctaggggctcccagccatcagccatctcagcagcatacaaaagacagtttttgtctgtttgtttttgtagttttgagatggagtctcactcttgttgcccaggctagagtacaatggcacgatctcggctcaccgcaacctccgcctcccgggttcaagcgagtctcctgcctcagccttctagagtagctggaattacaggcatgcgccagcacacccgactaattttgtattttaagtagaggcagggtatctccttgttggtcaggctggtctcgaactcccaacctcaggtgatcctcctgcctcagcctcccaaagtgctgggattacaggcataagccactgtgcctggccatttgtttgtttttgctttgagatggagtcttgctctgttgcccaggctggagtgcagtggcacaatctcggctcactgcaacctctgcttcctggattcaagcgattcgcctgcttcagcctccagagtagctgcaactacaggcgcgcgccaacatgcccaactaatttttgtatttttagtagagacgaggtttcgccatgttggccaggctggtctcaaactcctgacctcaggtgatccacccaggtcggcctcctcaagtgccgtaattacaggcctgagccaccgcgccagggccccatgtgtgaacttcttaatacaccactaggtggcagtgatttgcagcccgtggttgtattaaacagacttttttttttttttttttttttttttgagacgaagtcttgctcttgttgcccaggttggatggagtgcaatggcctgatcttggatcaccacaacctctgcctaccagcttcaagcaattctcctgcctcagcatcccacattgctgggattacaggcatgtgccatgatgcccggctaatttttgtatttttagtagagacggggtttctccatgttggtcaggctggtctcgaactcccaacctcaggtgatccacccacctcggcctcccaaagtgctgagattacaggcgtgagccaccacgccctgcctaaagagacatcttaaatacgcctttatttttagacaatagaaaaataagcttcccattatgcaagagtcctatggcctttgtgctttcctaccctgtgaactaagagtctaaatctgtgaaaagatgtccatgaggtagagttgaattaaaatagcaggttgcagaacaatatttgtacctcctcactttcttcttttctgcctctctcccttccttctctacttccacaaaagttgactgagcacctattgtgtgctaatatatgctaagttactggaaatgcaatggtgagcaaagcaacaccagtgtagtccctgtggatcttatagtccctcattgatggacagataggttggttccaccttctcattataacaaataatactacaaagaacgttttatacatacacttgagtttctctagggcagtggttctcaaagagtggtctgggccatgagaccaaaacaattttcataataatattaagatgttatttggcctttttcatgctcactcttctcacgaatgttcaatggacctttccatgaggctacatgacatacgacattgcaacaaattgatggcagaagcagataggagaattcagatgttttctattaagccagatatgagatttgaaaaaaaaaatgtaacatacacagtgacacttttctcactaatttttttgtttgggaaaatatagttattttattattttttggagagagggtctcactctgttgcccaggctggagtgcagtggcaccatagctcactgcagcctcaaactcgtgggctcaagtgatcctcccgcctctgcctcccaagtagctgggactacaggtgctcaccactatgcctggctaacgtttttatttttagtttttgtagagattgagtcttgctatgttgcccaggctggcctctaactcctgggctcaagcagtccacccacctcaacctcctaagtaggtggatctacaagctctcaccactgagcctggctccctccatcatttttaagtgcaatggagacctggtaccaagtggtttgagactcactgttctagggcaagggtccccattgcccgggcctggaccagtacagtctgtggcctgttaggaaccaggctgcacagcaggaagtaagtggagggcaagcgagcattacttcctgagctctgcctcctgttagatcaggggcggtattacattctcataggagcacgaaccttattgtgaactgcacacatgaggactctgggttgcacgccttttacgagaatgtaatggctgatgatctgaagtggagcagtttcataccaaaaccattcccccctttcctcccaacccgtccctagtgccaaaaaggttggggactgctgttctatggtatctatcccgaagtggagttgctgtgttttacagtgtccacaatttcagttttactaggtgttgccaaattgctctccaaagtggctgaagctaatttattattttttttaaatttattttgagatggtgtcttgctctgttgccaggctggagtgcagtgtcgcgatcttggctcactgcaacctccgcctcctggattcaagtgattcccctgcctcagcttcccgagaagctgggattataggcgcgcactcccacgcccagctaattttttgtattttagtagagacagggtttcaccatgttggccaggctggtttcaaactcctgacctcgtgatccacccacctcaacctcccaaagtgctgggattataggtgtgagccactgcgcctggcctttttttttttttttttttttttttttttcttaagaaggagtctcagtccatctcccaggctggagtgcagtggtgcaatcttggctcactgcaccttccacctgccaggttcaagcaattctcctgtctcagcctcctgagtagctgggattataggcacgcaccaccacacctgactattttttttatatatttagtagagatggggtttcatcatgttggccaggctggtctcaaactcctgacctcaagccatccggcctctcaaagtgctgggattacaggcgtgaaccacctcaactggtcaaaagctaatct[139 bp omitted]ggtgaaaccccatctctactaaaaatacaaaaattagctgggcatggtggtgcacgcctgtagtcccagctactcaggaggctgaggcaggagactcacttgaacccaggaggcagaggttgcagtgagccaagatcgcgccactgcactccagcctgagcgacagagcaagactctgtctcaaaaaaaaaaaaagaaagaaaaaaaccaaccaaacaaacaaacaaaaaaactggctgaggaggacaaatcacttgagcccaggaatttgaggccagcctgggcaacatggcaaaaccccatctctacagaaaataattttaaaagttagttagaagcctttactaacttaggggaaaaaaaaattagccaggcatggtggtgcatgcctgtggtcccagttacttgggaagctgaggtgggaggatggcttcagcctgggaggcagaggttgcagttagctgagattgtgccgctgcactccagcctgggtgacagagtaagaccttgtctcaaaaaaaaaaaaaaaaaagtacatatccttgatgtttttgtcgttgtttttcccaaatctcaaattgtaaagaattgtgaaattattagactagtaaaagaaaaaaaaataaagtagactagtgatacaatacaacagtgagttgctgtatgaaatgttcattttcttttctaaacaatactgtgaaaagcagggtcacatttatcttaaatgttctcagaggaagtttttcttggtcactgagaatggctttgtacagtatcaacattacatgtatcggaaaatttatttttgtttgggggctcattggggataaaagtgtacaagttatgcaaataaaccttttttaacatcaggggaatttcgttattcttaaatactaccttctgcaatttttgttaaaaccatgttccactaacacctaatttgtaaaaaaaaaaaaaaaaatacagagggatctagtgttaaaacaacttaaaggctgttagtttatagttcactttgtaaatgagagtttatttttaccagtttagggctttttaaaattattcatagaatatttaattgttcaagtgtagctgatctaaaactttaatggcattaaattttggcaatggaatatgttgatcaggctgggcgcagtggctcatgcctgtaatcctaacactttgtgaggccgagacaggtggatcacctgaggtcaggagttcgagaccagcctgaccaatatggcgaaacccgatctctactaaaaatacaaaaattagccggacgtggtggtgggagcctataatcccagctagaaaaaaagaaatacgttggtcaatatgagaggttgagttttacagttgaaggggaagggtgcagcgatattaattggctgtttctgacagtagtttggcacatagttgtatgtacactctgctccagtaaaatgaaatgcgaccacagtcaacggttacctatttatgctggagggtgtttggcaatcaactgttaatttaagtgagattccattctgccgcttagccatggcagagcacacacatgtgcactcagggaaagcagatggaataggttataaacagaagcaaactccaattcaggagacatgttcacgcagaaatagtactatgatgcaacatacatcacaaaaacaaatggaaattgtgtttgtttgtttttgagatacagtcttgctctttcgccaggccagagtgcagtggcacaatctcagctcactgcaacatccatctcccaggttcaagcgattctcctgcct[131 bp omitted]cctcccaaagtactgggattacaggcgtgagccatggcgcccggcaagaaatttttttttaaatctgtctttaggggattatctagctattagtggggttaaatgagggaactgtcgcctcggcagaagagatggtccactgtattcatttgtcataataaccagactcctggagttactgggttctaaagttgttgatacagcatgaataggtttggatgtggagttctgtatggaggatcctttcaacgggaagataaaccaaaattgttggtcgtagccttttggactactgacttaagagattatttgaatctctttaaagagtcaaaattggctgggcgcggtggctcatgcctgtaatctcagcactttgggaggccagggcaggtggattgcttgaggtcaggagctcaagaccaggctggccaacatagtgaaaccccatctctactaaaatacaacgattagccaggtgtggtggtgggcacctgtaatcccagctacttgggaggctgaggcaagataatcgcttgaacctgggaggcggaggttgcagtgagctgagatcgagccactacactctcagcctgggtgacagaatgaggctctgtctcacacacaaaataagcctgtattgttgtaaatagattgtgaagggtgattctggtgagggctcagaagaagaggagagctacagagaaagcctcagttttcttagagattacctaagaggttgtaccagaaggctagtagaagtatggatgttaaaggccattctgatgaggtctcagatggaaatgaagaacatgttattggaaactggcagaaaaatgatcctgattatctggcaaagaatgtggctgaattgtatgtcctagtgttttatggaaggtagaaattctgagtgatgaaataggatattcggtggaaaaaatatctgagtaaagtgttgagagtgcggcaaagcttctcttgaatgcctgtagtaaaatgctagcagagagaaaccaattaaagatggtctttctttctctttctctctctctctctctttctctctctctctctctttctttctgagacagagttttgctctttttgcccaggctggagtgcagtggcgcgatcttggctcactgcaacctccacctcctgggttcaagtgattctcctgcctcagcctcctgagtagctgggattacaggtttgtgccacgacgcctggctaattctgtatttttagtagagacggggtttcaccatgttagccaggctggtctcgaacttctaacctcaggcgatgtgcccttctcagcctcccaaaatgctgggatgacaggcatgagccaccgcccccggccaaagatgttatttatgatttaaaaagcagcagaatttaaatatttagaaatttaccaacctgcccatgttgtaaagaatgaaaaagcttgttgaagagaaaacaccaagaatgtgaccaaggaaacttttgataaggaggttagtgtggggagatggaagccagatgctcagcatcacagcgaagaaggaccctgaaaccattccgaagatctttagaggctgccctgcccatcacaggcccagaaaactaggaccttgaagtcaaagcgatttcaaggctctgctccctgcattctggtgcagggctcctggcataccctagctgtgactcaagtgggcccagctgtgactcaggccatccctctgggaggcatagacagtaaagcatggtggtgtccaagcagttttatctccacagctgcgcaaagtgcatgggctgtgagggcattgctacctctacctagatttcaaaggattcctgggggaatcttgaggcccagacggagcaccgccaaaggggcagggccactgcggagagcccccactagggcaatgcccagcacagccatggggacgggggtgcctccaagaccccagaatgttagggccaccagcgtgcaactccagcctgggaaagctgcaggtccgagactccaactcatgaaagctgcagagtgggctgtgcccagcaaagccatgggggggccgccccgagtcttggaggcccaacccccatcccaatatctggggggtaggacgtcaagtcaaacattattctcaaaccttaagacttaatgttgtttgccatgttgagtttcggacttacttgggacccatcacccctttcttctttcctatttctcccttttggaatggaaatttctatcctatgtcagtcccaccattgtattttggaagcatacttacattgtataagtagtttgatttcacaggctcataattggagagcaatttgcctcaggatgaatcatatcttgacttttgcccagacttggaatgagtcaacatttagttgagatgttgacttagactttaaagctgttattggaatgagttaagacttttagggctattgggatggaataaatctattttgcatttgagaaggacatggattttgtgaggtcatgggcagaatgctatggtctatgtttgtgtccccacagaattcgtatgttgaaatctaacccccaagatgatggtattaagaagcagggtgtttggggtgattagatcatgagggccctgccctcatgaatgggatgaatgcccttatgaaagaggacccaggctgggtgcggtggctcatacctgtaatcccagcatttagggaggctgagacaagaggattatttgagtccaggagttcaagaccagcctgggcaacatagtgagactccatctttaccaaaaaaaaggaagaaagaaagaaaaaaaataggccgggcgcggtgactcatgcctgtaatcccagcattttgggaggccgaggcaggtggatcatgaggtcaggagatcaggaccatcctggctaacatggtgaaaccctgtctctactaaaaaaatgcaaaaaaattatccagttgtggtggcaggtgcctgtagtcccagctacttgggcggctgaagcaggagaatggtgtgaacccaggaggtggagcttgcagtgagctgagatcatgccactgcactccagactgggcgacagagcaagactccgtctcaaaaaaaaaaaaaaaaaaacagccaggtgtggtggcatgtgcctgtagttccagctactcaggaggctgaggtgagaggatcacctgaacccaggagtttgaggctgcagtgagctatgattgtgctgctgcactccagcctgggtgacaaagtaagactctgtctcaaaaaataaaataatataaaagaggccccagaaagctgtcttccccttctatcatgtgaagacacggtgagaaggtgtgaagcacagagtgagccctcaccaaacaccaaatctgctggcgccttgatcttggactccccagcctccagaactctcagcaacatttctgtttttaacaaattatccagtctaaggaattttgttatagtagaccaaatggactaaaaccctgggtatgtggaccactccaggccaatgagacattagggaaagttgctgggggctcacctccctaataaaacgatacagccaggcgcggtggctcacatctgtaatcccagcatgttggtaggctgaggcaggtggatcatgaggtcaagagatcaagatcatcctggccaacatggtgaaaccctgtctctactaaaaatacaaaaattagctgggtgtggtggtcccagctactcaggaggcttaggcaggagaatcgcttgaacccaggaggcagaggttgcagtgagccaaggtcgcaccactgcactccagcctggtgacagaatgagactccatctcaaaaaaaaaaaaaaaaaagatacatgttagtaatgcacattttctttctaactttgaatgttatcatgtacagatgcttggagctgtggcagctattttgccaccatgaggataaggctaagcaatttgaaattagtccacacccctaaattatggagctgctgaattctggagtgtttacctctagacttcttgctttgtgaaattataaactcctcattgtgtaagttatctttagttggatagtctgttctttgcagcctaaagcatcctatcgaatacacatgatttgtaaaatttgttgttggtaataccagtgcatttcctgaaaacaatcttgtttgtattgcaaagaagatcagatagtaattattataaggaaaactataatccactgatttgtggtatgagtaaagcatcagttcttttttttttttcaagacagagtcactctatcgcccaggctggggcacagtggtgcgatttcggctcactgcaacctccaccttccagcttcaagtgattctcctgtctcagcttcctgagtagctgggattacaggcgcccgccaccatgcccagctaattttagtatttttagtagagatggggtttcactatgttggccaggctagtctcaaactcctgacctcaagtgatccgcctgccttggcctcctaaagtgctgagattacaggcatgagccaccgcacctggccaagcatcagttcttaaaacagttaaggtggcagaacaggagttctttcaaaatgatgattttcagtatttgtgggtatttcaacatcatcatagtcatcttcaggttcaatatagctcaggatggaaactatctccttatttcttttttttttttttttgagacagagtctcactgttgcccaggctggagtgcaatgtcatgatcttggctcattgcaactctgcctcccagattcaagcaattctcctgcctcagcttcccaagtagctggaattacaggtgcccgccaccatgcccggctaattttttgtattgttagtagacacggggtttcaccatcttggccaggctggtctcgaactcctgacccccggtgatccacctgcctcggcctcccaaagtgctgggattccaggcgtgagtcactgcgcccagcccttatttctaactttatttattgatgagtatgtattcaataggtaacttggggattcctgtggtgctggactatacaaaaagatcctattaaatcttgatatatttaaatctcatccaaactggtaacaatttccctagtagaaaacttggctttattatacgttcccagtataaaatctcagccaaattacacatgtccagaggaaaaaaaattgttttgtcaaaccaattggtagattttccatgaatgttcaacagtcaataaatattgcctaccatgtgccaggttttgtgctggacattgggaatacagcactgagacaatttccatcccaaaggagcccccagattagaaaggaggatggaaagtaaccaggtaattataattataatatataataattataatacaaagggagaagtatttccatagggccaagtatgggagctgtgagagctcagagttcattgattcattcattcaacccagttgattattcaacatatttattgagcatctacaatgtacctgggcactgtgctaggaacagggaaaacagtagaggaaagaaggacacattccctgccctcatgttgctttgggtctagtggaggagagagacagataagcaataattataacatgctaatgctatgaaaggagagcatccaggaggcaccaacccaagttgggtcatgaggaaagggtagccaagatgaaatgggaaggatccaaaggtggggaagaatgtttcatacagaggaatagcgctgtgcacagggcaagagggaccatagtgaaggtcattttattttattattattattttttttttgagatggagtcttgctctgtcacccaggctagagtgcagtggtgcaacctaggctcactgcaacctctgcctcccaggttcaggtgattctcctgcctca[209 bp omitted]aaaaacttgggcagagtggaggttgcaagggggttgggggagaagagtttggcaaaagataatcagtgaccagatcctgacaaatcttgtaagccatgttaaagagtttggtctttttctggggttaacgggcaaagagaagatttaagcaaaggaatgaagtggtcagatgttcactttaggaagtcactgggtgccatgtagaaagtggacggcaggtgaggtgccagaggcaggggagcagtcagggggctgttgatattctcctggcaagcgctggcaattgtctgacctcagaacagtgacggagagacgtggactcattggagaaccacgtgggaggcacaagtaacatggggagctctggaaacaaagcagtgtggggagaaggatactagtttctgacttcagcaactaagaagatagtagagcacaagacatttgggactggaggtaggtcatcagttccttttggtgtttgctgaacttgagggggtgtgtggggcagtcacaacgagatgtcttagaggcaacccagctggggagaaagagctcagctgaagtcagaatagagggggcagctgggcgtggtggctcacacttgtaatcccagcactttgggaggctgaggcaagcggatcacttgaggtcaggagttcaagaccagcctggccagcatggtgaaaccccgtctctactaaaaacaaacagaaaattagccgggtgcaggcgtgttggcacacacctgtaatcccagctactcaggaggctgaggcaggagaatcgcttgaacttgggagggggaggttgcagtgagctgagattgtgccactacactccagcgtgagtgacagaatgagactcagtctcaaaaaaaaaaaaaaggaggggcccactgagctcatggacattggtgagatcactcgtgagtgttggaggcagatgggcagagacacagggacagaacctgaggaagaccagcattgaagagatgcttcagaaagagtgggtggccccaaaatgagacggagacaggaggagaaccaggagagggtggcgtcccagaaaccaaggaagaatcaacatttgtctggcatttgtttttaacttttgtcatagtcatggagggtttacagaacatttataagacgaaagcatgtgtttgaaacactccaatcctttggcttatttttgttctataatttgggaagagtcctctctttggctggtgggataccagagtcccataaggccatagttagataactactggcctaacataaggagggtttatttatttatttatttatttatttttagatggagtttcactcttgttgtccaggctggagtgcaatggcatgttctcggctcaccgcaacctccgcctcccagtttcaagcgattcttctgcctcagcctcccaagtagctgggattacaggcatgcgcgaccatgcctgactaattttgtatttttagtagaaatggggtttctccatgttggtcaggctggtctcgaactcccgacctcaggtgatccgcccaccttggcctcccaaggaggtattaatagcaaggtggaagccttcatagagtctggaaagagagaaccagggaggaagcccaggtccccagtgctccagcgttgattgagggagaaagcttgaaaatgggaggaacacattttcccatctcttgagggaaatctgagtcactctcaggcctttccaggttcacagtgctctctctgcaaggctgttcatttgccagatttcccagaggtcacttagaaaccagcatcttgtgagtatagttagaatgagtcaagtcctagggctctggcgatcagctagaaggaattgatgaggtctaagagcctataaagctgactcgggccttgttgaccccattaggacacttgtttaacaagacatctgcccatgtccctggcccatctcattggctgcagcacatcacagtggaccttctgcctcctcccagatgcccagggacagtgatctggaaggaaggggcttgaggctgttttcctagaactcgagtaagtactgatgaaaatgatggacaggggatattaagccccctgaactctcatcttgtatatgccattgttacatgccccttttctttcctgttccccatgatttgtcctgggggaaatgtatttttcctgtagcacccccaacacacctattgcaaaatgatgcttctaggtgtaaatcagaaggtaacttttgtcctttgtccattgttacagtacaacttgcaagcacggggagaaaacctaggtgaaaactcaaatctctatggtcaatttggcctacatcatataaaggcactggggtttgcagggtgtctaggtggggagggttcacgagaacaaaaggtactccctgcccttgcaaactcgcgagatgtggtgtgggaacctgggcacgagagcactcagctgtaactcacccacagcctcacagtgcaggaggtgggtggggtgagagggtaaagaccagcatgcttggtgagggccttgctggggatgggagcctgggagggtctgcacaaccaaatgctgagatttaatatcactcagaaccatgcaaaccaaagggaatgaagggggaaagaatgccaagaaatgagtagtttcccacaggtgggagccatggagccccgtggtccttcccatggaaagtttcctcaacagcacaaggctgacccctctaagtcctcagagccgagcacccatgtgtctcctctggctgcagtcatccgatcgcaggggtgtcttcatctaaggtttgggaagtgctttatcttatagagcttcataaaatcaccactggctttcagggcccagagacctactgaagttcaaccattcttgattgttttaaaataagttgtgtgaaccctcttcagttttgccaaaaagaagaaatggctgtttcaaaatgatgctttttcagtatttgcagggatttcaacatcgtcatagtcatcttcaggctcaatgtagcttgggatggaaacagtcttcttatttttaactttatttaccagtgagtatgtagcgggcggctgacttggggcttcctgtggggctagaatacacaaaaagctccttagatgcaaagctgtcatgtgtttttatatttttgaaggcagtggctcagcgtgattttcacgtttcagtgatcttcccacttctagtgggccagatccccattttacagaggaaatttagacacagacctgacagagcctcaggatcacccaagtgagtaactggaaaatattagtcagacatcttgactcccgtatctttctgcctaagcctgcactgcatggaaaccatgaagcaaaagcttagaaaagaaacagaccaggtcaggtgcagaagctcacacctgtagtcccagtactctgggaggcccaggtgggaggatcacttgagcccaggagttccagaccagcttgggcaacacagggagaccctcgtccctacagaaaaatttaaaaattagccggatgtggtggtgcatgcctatagtcccagctaattgggaggctgaggcaagaggatttcctgagcccaggaggttaaggctacaacgagccatgatcacgccactgcacttcagcctggacaacatggtaagaccctgtctccaaaaaaaaaaaaagaatggatgaaaagaaacagaccagagcccagtagtcatatgagtgctgttgtgttacagatcctaatttttacaaggaagtgaaacaaatcatatttcctttttggcacatcccttccagtgacttacactgttttccaggactctctgtaattgcttatgtacaaatctctctaagaagaaaggggatggcgttgttttcaaaaggtggaattagtacagaacaggttcataggaggctggggcgcggtggcttatgcctgtaatcccagcactttgggaggctgaagtgggcagatcacctgaggtcgggagttcgagaccagcctgatgaaactctgtctctacaaaaatacaaaaattagctgggcgtgatggcgggtgcctataatcccagcaactcgggaggttgagacaggagaattgcttgaacccaggtggcagaggttgcagtgagccaagattgcaccattgcactctagcctgggcaacagagcgagactctgtctcaaaaaaaaagaaagaaagaaagaaaaagaaacaaaaaacaaacaaaaagaacaggtccataagtaatagaaggatgatgaaacagctcagctccatctttgatggggattggaactgcctctcccacaatctcatcttttcctaagaaaacctgaaatgccactatttgcagaactctgcagtttgacagaccagagttcatgttcacgttccagcagtcattagctgtgtgactataggtaagtcacttatctgtgcctgag[139 bp omitted]tggtgaaaccccatctctactaaaaatacaaaaaattagccaggcatggtggcaggcacctgtagtcccagctacccaggaggctgaggcaggacaatggcatgaactcgggaggtggagcttgcagtgagccgagattgcgccactgcactccagcctgggcgacagaccgagactccatctcaaaaaacaaacaaacaaaaaaatgtacctggcttgtagagttgtgaggagtgaatgagctaatacctgtaaagtgcttagtgtgggacctgaaacacagcgcatgctcaataaatgttagctaatattatttatctatccaatcaaaatatttttcttaagtatcgactgagcctcacgccctgttctaggtagtggataaatattaatagtggtggacaaaaaaggttcctgtgttcctgaagtttatactccagtggaggagatcaataatacataaatgaacaataagtaaataacacaattttggataactgtcagtttcataaaggaaattagcagaactactttaggttgagtggacagagagggcctctttgaggtggtaacttctgagctgacatctgaaggatgaggaaaatccagcgaggcaaagagcttaaggaagaacattccagtcaaaggaaccaggcagagtttttctgataggaagtgaaaggcctagtgacaccccatgtttctttctgtttatgttccaagctgggatttgaacatgaatttacacccttatatcaggctattgggtgcgtcggtacttatgctgccccctttttgcttttccatcccttttttttttttttttgagacagggtctcactctgtcgtccaggtgcagtgatgctatcgtggctcactgcagacctcccaggctcaagcgatccccccacctcagccttccaagtagctgggactataagtgtgcaccatcacgctggctaatttttgtaaagataggattttgccatgttgcccaggctgttctcagactcctgagctcaagtcatcagcccgccctggccttccaaagtgttggtattacaagcatatgccactgtgcctggcctctggctatctcttttaaacaggatgctggctgtgtgtggtggctcatgcctgtaatcccagcaccttgggaggtcgaggcgggtggatcacttgaggtcaggagttcaagacgagcctggtcaatatggtgaaaccccgtctctactaaacatacaaaaaattagctgagtgtggtggtgcacgcctataatcccagttactcaggaggctgaggcaggaaaatagcttggacctaggaagtggagattgcagtgagctgaaatcatgccactgcactccagcctgggtgagaaaccaagactctgcctcaaaaataaaataatcaggatgctgcatctataaatcctagtgttacagactgaatgtttgtgtccccccaaaattcaggtgttcaagccttaacccccagtgaggctatatgtggccatagggatgaggccttgatccaacaggatcagtgtccttgtaagaagaaacaccagaaatctgactccctgatgctcttccccagcttgaatgcaccaaggaaaggccatttgtggggacatagcaagaaggcagctgtctgcaagccaggaggagaaccctcaccagaaacctcacagaaatcggccaacaccctcatctcgggcttccagcttcagaacaacgagaaaacaaatttctgttgtgtaagcaccccagtctatggtatttttgttacagcagcctgagctatctaagacaccttcataggggacgggcgtggtgtctcacacctgtaatcccagcacttcgggaggc[135 bp omitted]gaggtgggagaatggtgtgaacctgggaggcggagcttgcagtgagtggagatcgcgccactgcactccagcctgggggacagagcgagactccatctcaaaaaca[141 bp omitted]gtggcgggtgcctgtagtcccagctactccggaggctgaggtaggagaatggcatgaacccgggaggcggagcttgcagtgagccgagatcgtgccattgcactccagcctgggtgacagagcaagactccatctaaaaaaaaaaaaaaaaaaaaaaaagacaccttgataaactcgttatcttaccctaaatgaaactgctaccagtaaaatatacttacaagagtcttctagagaaggccaattcctcggtggcagaggcggtaattgaactggcgactcattaagaacattcctagagagagagaaagagagagaatcagtgtttggtttgggccatgcctgctcccagccgatttaagagaaaacatcaaggaaagtgaatgggttgaacattcaaatcttggtctctactaattggaagcatttcctttcctttgtaggtcctggttcccatttgtaattggcaccctaatgaaaccgttttctgtagccctggaaatggctgaaaatgaggggagggaaataaagtgctataattcagagcatggagcacaccttcctggttcacctgagctggattcggagaggtaggca[133 bp omitted]gaaaccctgtctctacttaaaaatacaaaaatcagctgggcatgatgatgctcacctgtaatcccacctattcgggaggctgaggcaggggaatcacttgaacttcggaggcggaggttgcagtgagccgagatcatgctactgcactccagcctaggcaacagagtgagactctgtctcaaaacaaacaaataaaaaaacaaaaaacaaaagcagatgaactcctaaagcagaatgtacacacaccttgagtcagcatttccactactgggtctacagactattgaaatgctcgcatctgttcaccaaaacatgcattagaatgttcagagcaacactattcataacagctctgaattggacacgacctgtattagtctgggttgtccagagaagcacagacacataaaatttgccatcacacaactcaaatgtccatcagcagtagaatggatagattaattatggtaaagtgactgggcaaggtggctgacattggtaatcccagcactttgggaggcgaaagagggaggatggcttgagcccaggggtttaagggtaatatagggagaccctgggcaacacagggagacccagtctctacaaaaaaatcaacataattagcaggttgtggtggcatacacctgtagtcccagctactcaggagactgaagcaagaggatcacttgagcccaaaatttgaggtgacagtgagctatgattgcaccactgtactccaacctggttgagagtgagaccttgtctcaaaataaataaataaataaataaatactggtgtactcccacggtggaatgttctatagcaacaagaatgaacaatctacaactacacacaatgaatctcataaaaatgatgttgagcaaaaaagccaaacaccaaataatatatactatatgatgccattaatagattgcataaaaaccaaaaagctgctgggcacggtggctcatgcctgtaattccagcactttgggaggccaaggcaggcagatcatgaggtcaggagatcgagactagcctggccaacatgatgaaacccagtctctactaaaaatacaaaaattagccaggtgtggtggcgcatgcctataatcccagctactcaggaggctgaggcagaagaattgcttgaatctgggaggcggaggttacagagagccaagatcgcgccactgcactccagcctgggcaacagagtgagactccatctcaaaaacaaaaaaacaaaaaacaaaaaaaacccaaaaagctaatttatactatcacagacagtgattgcctttgggatgtaatggttgaaaggctgtataaagtcagcctctgaagtgctggtaacgtcctatttcttgatctgggtgccagtgacctgggtctgttgagttcgtggaaattcatcaggttgcacactcagtatttccattttcctgtatttatatgatactttggtacaaagttttaactaaaagataaactctaagaaaacttccttacttgggcctccatccccctaggtacactgatttgactcctatatgctataaagtccccctgagaatgaataaacatttttaggttgttaggttgagtgcagacggggacatgggggtagagctccaccggcggctctcaccatccctctgtagctcttcctaagagaagaaagcaactcatctgactgctaaatttgggaaaagtctagctcctctcactttctcctccagagctggcctgactgcagaattcacaaatcctgctctggtctttgccattcagaaaaaggggtctactcggtgggggagacctgaggttttccggagctgcctgtgaactggttaggaaagtcacccggttccaaattaggaaactcactagctcacagaaaagagccacattctgcaatcccagttttattcttttttgtttgcttgtgtgtgtgtgtgtgtgtgtgtgtgtgtgtttgttttattattattatactttaagttttagggtacatgtgcacaacgtgcaggtttgttacatgtgtatacgtgtgccatgttgatgtgctgcacccattaactcgtcatttagcattaggtatatctcctaatgctatccctcccccctccccccaccccacaacagtccccggtgtgtgatgttccccttcctgtgtccatgtgttctcattgttcaattcccacctatgagtgagaacatgcggtgtttgtttttttgtccctgcgatagtttgctgagaatgatggtttccagtttcatccatgtccctacaaaggacatgaactcatcattttttatggctgcatagtattccatggtgtatgtgtgccacattttcttaatccattctatcgttgttggacatttaggttggttccaagtctttgctattgtgaatagtgctgctataaacatacgtgtgcctgtgtctttatagcagcatgatttatagtcctttgggtatatacccagtaatgggatggctgggtcaaatggtatttctagttctagatccctgaggaatcgccacactgacttccacaatggttgaactagtttaccgtcccaccaacattttttttttttgagacagggtctcactttgacacccaggctggagttcagtggcacgatcacagctcactgctgccctgacctcaggggttcaagcaatcctcccacctcagcctcccaagtagctgggactacaggcagacaccaccacacctggctaattttggtatttttctcagatatgggtccccactatgttgcccaggctggtttcaaactcctggcctcaagccatcctcccacttgggcctcccaagtgctgggattataggcatgaaccactgcccctggccaataccagttttagttttttgcttttttttttttgagactgagtttcactcgtcacccaggctggagtgcagtggcacgatcttggatcactgcaacctccacctcctgggttcaagcaattctcctgccttagcctcccaagtagctgggattacaggcacacaccaccatgcccagctaatttctgtatttttagtagagacagggtttcaccatgttggccagactggtctcgaactcctgacctcaggtgatctgcctgcatcggcctcccaaagtctgggattacaggtgtgagctgctgcacctggccccagttttattcttaaaaaaggcaatatttagtcacctgactgcctgacacatttgtcttattcttgaaagggatcagaattgatggaggcagggggagtcttatttgctggatccctgaagctacaacaaaagccattttagaaaagcagagatttaaaaatgttttgtatacagggtctcactatgttgtccaggctggtcttgaactcctggcctcaagtgatactcccactttggcaaagtgctgagattacaggcatgagccactgcacctcgccccaagtgtaagttttgttttagatagtgtgtatactccaaagaaaggactggctcttgactggctcctgggaaataatc[222 bp omitted]gaggcaggagaatcacttgaacctgggaggcagacgttgtggtgagccgagatcgcgctattgcactccagcctgggtgacagagcgagactctgtctcaacaacaacaaaaaaagtgtctttgaggccgggcatggtggctcacacttgtaatccgagcactttgggaggccaaggtgggtggatcacttgaggtcaggagttccagaccagccatggccaacatggtgaaacgccatctctactaaaaatacaaaaattagctgggcatagtggcaggtgcctgtaatcccagctgcttaggaagctgaggcaggagaagcacttgaacctgggaggcagaggttgcagggagccgaaatcacgccattgctctccagcctgggtgacagactgggactccatctcgtaaataaataaataaagagtgtctttgtatatctgggagccttgggccacaccagatagtttatgttaataatgtggtttatggtgaatgcctgtttttgtttgcctggggccctgggccatgtttgatcaatttgataaagctaagtgcaggtattccatgcctacatgactaacccccagtaaaagaaaaactctgtactccaaggctcaggtgaggttctccagtcagcagtgcttcgcgtctgttgccacatattgttactgggagaactggggctctctgtgcgacttcactgggagaggacaactgcaagctttgcctgctttctgctagaccccacactccatcactttttcatttgctgattttaatctgtattctttcgccataatgtactgtaattgttgagcaaaatcgcttttctgtgttcttctagtgaattctcaagcctaagagtggccttggagatccccaacgcagatattggtcataaagccccaaatagatcacaaaacacaaaagtaaagtggatggcatatttttcttcagcgcagtagcttttggaagactatatttggaatccaccaaaagaaaagaagtatagactgggcgctgggcccagaacacagagcccaacctgtgacctttgtcagaatagatgagagtaggctgggcacggtggcatgtgcttgtaatcccggctacttgggaagttaaggtgggggaattgcttgagcccaggagtttgagacccacaggagttttagagctgcctgggcaacatagcaagaccccatctccaaaaaaaaaaaaaaaaaaaaaagaggctgggtgcagtggctcacgtctataatcccagcactttgggaggc[133 bp omitted]ggaaggctgaggcaggagaattgcttgaacctgggaggcagaggttgcagtgagccgagattgcgccactgcattccagcctgggtgacagagtgagactccatctcaaaaaataaaaataaaaaaaaatagaactaccaggcgggcctggtggctcacgcctgtagtcccagcactttgagaagccaaggtgggtggatcacctgaggtcaggagtttgagaccagcctggccaacatggcgaaaccccatttctactaaaaatacaaaaattaggcaggcatgatggtgggtgcctgtaatcccagctacttgggaggctgaggcaggagaattgcttgaacccaggaggcggaggctgcagtgagccgagatcgtgccaatgcactccagcctgggcgacagagcaagactccatctcaaaaaaaaaaaaaagagagagagagatgagaggagggaggacttgccctgcatcgacaatgtcctgagtctctgcccttatgtggagagatttggcaggtgtgaagtctcgccagctctacaggaaatgcggatgtctcagtcatactggtacggtagtggaggggcaagggtggaagggaacaggcagttctcaacagtaaaaagcggaaggattcccccctacttactcatacatcttttcttcatctacttgcttgtgtttcaggggcttggcaatttcccatttcttgcctaagaggggaaaagcatgttcattgaagaagaattagcaaaagttgtgattttttaatttaacccagagaaaacacacttagggacacagttaataaatgatagagccggacttagaacccagacagtctaaccacagagcctctgcactaacccagtgaaggcagccacagcatgggtggtgtttattttctctatgcctggcacttaggtggcacttagaaatgttggctgaatgaataatcaaaagtgtggttgggaggaaatcagataaagaatcggaaaagcagtttgtatcctgtagatggacatacacgttgttataaattatagcctgcttgttaataggagtggttgaggataaaaagaaagtaggtgaagttttagttctgggtcattcctttgtccatatttgagaatggaaactattttctccccccagacagagcctcactcttgttgcccaggctggagtgcagtggcgcaatctcggctcactgcaacctctgctccctgggttcaagcgattctcctgcctcagcctcctgagtagctgacgttacaggtgcctgccaccacacctggctaatttttgtatttttaatagagatgggggtttcgccatgttggccaggctggtcttgaactcccgacctcaagtgatccacccgcctcagcctcccaaagagctgtgctgagattacaggcgtgggccactgcacctggcaggaatgaaaacttgtttttttttttttttaagatggagtctcacactgtcgcccagactggagggcagtgatgcgatctcggctcactgcaagctccacctcccaggttcacaccattctcctgcctcagccttcctagtagctgggactacaggcgcctgccaccacgcccggctaattttttttgtattttaagtagaaacggggtttcaccg[139 bp omitted]ttgaattaaagctttcgtgtttctggagatgaacaggaaagtggaaaccccacttacagataatctaaagttagtgttaatccctaggccacttatttatgtctgagggtgccaagaggtttctggtctaggtaataccagaaaattcagagtatggtctcagagaaggcaatcatggtggccaaacatgttggctgtggattgagtccatattttattcctcaagacagttctttttttttcttttttgatatggagtctcactcttgtcatccaggctggagtgcagtggcacgatctcggctcactgcaacctccgcctcctggattcaagtgattctcctgcctcagcctcctgagtagctgggattacaggcacccgtcaccacacccagctaatttttgtatttttagtagagacggggtttcgccattttggccaggctagtctcgaactcctgacctcagaggatcccaccacctgggcttcccaaagggctgggattacaggcatgagccaccacgcccagccgagacagttcttaatattccatatacttgtgttctcgcaagatgctgtgcgcagtagccacatagggaagaaaaagcacttgagcatactgtgccttcaaacagattctgctttcacccagatgattagggctggaagggctcttggagattagttgatgtccctcctttcactgtgtggatgaggaaactgaggcctagagacataatgtagtggcagggttaggactcaaacccagaatgcaagatgcttaatccaaaattcagctcattcaggcccaggattgatttgcttgccctaaaggagctctactgcaccgataaccacctggctcctccctccacctgcctaggtaaaatggccattacctcgtctaagctgccacttacagacacagtacaggatgaggcccagacccacagagacaacgatgatggccacagctaagatgatccagaaattattcctccaccagctcattgcagtggaatcctgagaagaatggagagagaagaatgaggtatgaatgaaagatatcctggggttgggtggagtggggcagttatctactgtgggttgttttttttttcttttctgagtcggagtctcactctgtcgcccaggctggagtgcaatgacgtgatctcagctctcagctcactgcaacctccacctcccgggttcaagtgattctcctgcctcagcctccagagtaacggggactacaggcacctgccaccacgcctggctaatttttgtatttttagtagagatggggtttcgccacgttggccaggctggtctggaactcctgacctcaggtgattcacctgtcttggcctcccaaagtactgggattacagacatgagccaccgtgcccagctaatctactgtgttgtgtagagatgcagacatctgcttaggaatcaggcactggatcacagccataccctactcattaacacctgggggacctcaggcatgtcactcgaccttctgtgagcctcatctataatatgggaatgatatctcctacttcactgaggtttgtgaggactggagatcgaacatgtacctactgggccctctagaaatggtagacatcatcactgctctttcagacatgcagcaggagggggaaggtgccatttaaagcaataa[132 bp omitted]cgagtagctgggactacaggcgcccacgaccacgcccggctgatttttttgtatttttttagtagagacggggtt[247 bp omitted]tgagtagctgggattaaaggtgtgtgccacctcgcctggctaatttttatatttttagtagagacggggtttcatcatgttggccaagctagtctcgaactcctgaccttgtgatctacctgcctcggcctcccaaagtgctaggattataggtgcaagccaccatgcccagccagttgtttttaatcacaaggacaagtcagacttaatgcatagcaggggagagaaattttgagagcttttgtttgagttgagggttagaaaaatagctggatgggtctctttgagtgagttatggtcagaagggtgaagctgaagatacagggcaaactgagttgatctgcatgagagagttaacaggcatttgggggctggaagctgacagaccagagaccgggaaagtctcggaaaaggttagcagcagagtgagaggtcaagaagagagcacaagtcagatcctggttaggaagctcccatagtggcaaatgaccaaggcgtttctaggacagtaatgcctcatgtccagccttaaattgctacctaggttatgc[148 bp omitted]catggcgaaaccctgtctctactaaaaatacaaaaattagctgggtgtggtggcacatgcctgtagtcccagctactcaggaggctgaggcgggagaattgcttaaagccaggaagcagaggtggcagtaagccgagatcacgccactacattccagcctggacaacagagcaagactccatctcaaaacaaaagcaaaggctgggtgcagtggctcacgcctgtaatctcataactttgggtggctgaggcaggcggatcacatgaggtcaggagttcgaaaccagcttggccatcatggtgaaaccccttctctactaaaaatacaaaaaattagctgggcatggtggtgcacgcctgtaatcccagctacttgagagactgaggcaagagaattgcttgaacctgggagtcagaggttgcggtgagccgaggttgtgccattgcactccagcctgggcaacaagagcgagattccatctgaaaaaaaaaaaaaaacaccgatctcaaagagggagttgtgagaaccccaacttgaagctggttgctctcaagttccagaggcccggacttgcgactgacgtctggggagttgggggcagcagtcttgggaactgagctgtgagatctgatactatctctgggtctatagtgctggcattgaattggagaacacccagctggtgttcactgcttggtgtgtggcggaaaaaccctcacacatttggtcacagaagcccttttctgtgttggtgattgttgtgctggtgtgagaacagaggaaaaacaccgcttgcagagtttttcctgaaacaatactctttagagcgatagaaataaataccacgacctgcgcattcaaagctgttgtatctggattgtgactgcgtggaaggtcgaggcgggaagacaggggctgttgcttttcgttataaactctgcattacttgatttttgcactacgtacatttactttgataacactggaaagaataaattggccatgtagtgtagcttccaaaaaaaactattgcttgggtttcaaggtcaaggaaatttcattctcatcagtttcttgggaaagaggaagtggaatgatgttgtcagaaagtgaaaccatgggtcattttcagaactactcagagtaataaatattttttgtcagttttgttcttacaagtgaaatggaccgcagagaggcactttttcttttcttttttctttctttcttttttttttttttgagatgaagtctcgctcttgtaccccaggctggagtgcgatggcgtgatctcggctcactgcaccctccacctctccagttcaagcgattcttctgcctcagcctctccagtagctgcgattacaggtgtgtgccaccatgcccggctaattttttttgtatttttagtagagatggggtttcaccatgttggccaggctggtctcgaactcctgacctcaggtgatccgcctgcctcagcctcccaaagtgctgggattacaggcatgagccaccacgcccggccgacacatttttaatagaaccaaggagagcttgctttttgagagagggcagctgagagagggggcctaagagaatcacatcctagttccagtaggatgtcctctaggccaccaggctggtttaatggccaaggtgcttccagagagaggaagccctggggaaggatgatagagagtacagaaaacagggagtacacaatggctgcatgaccgagttcaggccctgggaaggtatgaaagctggatcctacctgtgctggcagacctggagttgttgccacagagggccgataagattgtgagtacaggactactgagggctactgaaggatcgcaaagaagtgtttgcactggccgagtgcagtagctcatgcttgtaatcctagcacttcaggaggccaaggcaggcggatcacttgagtccaggagttcatgatcagcttgggcaacatagcaagaccctgtctctatatacacacacacacaacacacacacacacacacacacacacacacactcttacacttagccaggtgtggcggcatgtgcctatagtcacagctactcaggaggttaagctcctcctcagctactcagggggtttcaccatgttggccagggtggtcttgaactcctaatctcaagtgatccgcatgcctcggcctcccaaagttctgggattacaggcgtgagccaccctgcccacccagaatgaactttcaaaagggaacaaggattagagaagggagtgacactgaatagaaccagagagaaggggcttgggggcaggaagttgagagctcacacctaagtttccatttcctctgaggtgggaggcaaagtcaacagtgtgggggttgaggtgggaggggtccggcttgagcagagcagtgcaatagcacgcaccaactcctccaccttccagcccagtccccatcccccattcccatggcgctttcttcacaattttagttggtggagcctctctcgtgaggccatcctttctccttgcctaccgcatcccaagaagaactcagctacgtgaagggatgtca[133 bp omitted]aaccccgtctctactaaaatacaaaaattagccaggcatggtggtgtgcacctgtaatctcagctacttgggaggctgaggcaggagaattgcttgacactgggaggcggaggttgtggtgagccgagatcacgccactgcactccagcctgggcaacagagctagactccttctccaaacaaaattttaaaaatgaaaaataagttgggcatggtggcacgcgcctgtggccccagctacatgggaggttgaagtgggaggattgttggagcccaggaagttgaggctgtagtgagctgcagtcacgccactgcactgcagcctgggtgacagagccaaatcttgtctcaaaaaaaaaaaaaatgcattgagcacagtggctcacacctgtaatctcaacagttttggaggctgaggcaggaggatcactgaaggccaggagttagcaaccagcctgggcaacacagcaagaccttgtctctacaaaaaaaattaaaaatttgccaggcaaggtggtgcatgcctatagtcccagctactcaagaagcttaggtgagaggattgcttgagcccagggattcgaggctacattgggccatgaatgtgccactgcactccagcctgagtgacagagtaagaccctgtctcaaaaaaaaaagaaaaaacagtgaaatgcatttttcttccaactgagcctgtgacagtgacagttgtctcttggtgtatttgttctttttatttgtttgttccttgtctgtctcccacactgatgggcaagcagcataagagcagaggctttgcctgtaattaccactgtgtttctagcgcctagaacatcacctggggcaggacataccatacatatctgtgaatatacgaaagaatggatgatgccccagtctctttcccctgctatagatggacctcccacccgagaatgcaggcagaagtcactttgggtccagtaactgaaattactgtgctgtgcagtctaattccaaagcctcatctggacacgcgaccctgggcaggctccccgtcctgcgctggccattggctactggggccaagaggctggctgggaagcagtggcaatccaatgctggggaggtggagttccagcttcccctttgtttctccccattcctctagttgtccatgacattttcaaggaacatgagtgagcctgttgcagttctgggtggtttcagtggaaaggatttggcaagaccttccacagtgaagagggcgtgtgagtgggagagcaactgaaggcagtcaacacatcagcttcactttcatttctccaaagggcatttccagggtgtcagggacagaaa[137 bp omitted]acctccatctccccggttcaagcaattctcctgtcttagcctcccaagtagctgggactacagtcgcacgccaccatgcccggctaatttttatatttttagtagagatggcgtttcacaccatattggtcaggctggtcttgaactcctgacttcaggtgatccacccgccttggcctcccaaagtgctgggattacaggcatgagccactgcgtccggcgtatttagcatttttaaaagaagatcttcagtaagaaatatggtttacgttgtgatagttattcacgtattcacataaatgaagcgctgaagggccctaggctggccatcaagggaacaagttcccctcccctccccttcccccatctcctttctcccctcttctcctttctcctctctgctcctctcctctccactcctctcctctccggtcctctcctctctcctttctcctctcctcttctctcctttcttctctcctctcctttttctcctctcctttcccttcttttcctttttgtagagacaaaaaaatgttgtagacacacaaaaaatgttgcctaggctggtttcaaactctgggccccaagtgatcctccgccccagcctcccaaagtaccaggattacaggcatgagccactgcacctggccagagggaataggtttcctgttcccacttagctgttgcacttggaataagatgcttaacgtctccttgcaggcttctgaaaagcttccaagagatgttgcatgcaaaagagctctgtgtgcagaagatcaccaagcatgaggcattattaagggcaaaccaaccaagttctatttacaatagcaagtgtcttctaagaagggcagctaccgaccaggagagtcccctattctccctgcagaggatctgcagatctgcaaagctggctgggttaggaatgaagtttgctggtaggaactggggaatgttgaattcctctgggttatagaaggggagaatttggagttctgggagggaaggtgatgagaagaagggatggaaagatgaaaagggaagccagcaggatggtgcaaaggtgggagtgaacccgagggctagattaggcctgcagaacttaacctaccttacttgattttagtcacttgcttctagttgatcttaaaacctatatagctactgggggcagtggctcacacttgtaatcccagcactttgggaggccgaggctggaggatcacttgagcccaggagttcaagaccagcctaggcaacacagcgagactttctctctactgaaaataaaaacaaaacaaaacaaaacaaaacaaaaccagatgtggcggcatgtgcctgtagtcccagatactcaggaggctgaggtgggaggatggcttgactctaggagattgaggctgcagtgagctgtgattaccatcagtgcactctagcctgggttatagagtgagaccctgtctttaaaaaagaaaaaagcctatagagctaaaagtcatgtagctaagcaatatttaactggacttccactagcttcctgctggataacatctctgacat[139 bp omitted]atggtgaaaccccgtctctactaaaaatacagaaattagcctggtgtggtggcaggcgcctgtaatcccagccactcggaaggctgagggagaatcatttgaacccaggaggtagaggttgcagtgagcctccaggatcacgccattgcactccagcctgagtgacgagagtgaaactccatctcaaaaaaaaaaaaagaaaagaaaaaaagttgtttttcaggaacttggggtcagctcttatccagttcaagccacttatgaccatcaatccttcaacttggtctgtgtgagtgtccagtaggtgacgtttgatgtcagagcgccaaaaactccatcttccatcatgctaatgccaccattttgtgaacctgcatcctatgaagaacgatgaagcttgactaggcttgcacagattgccgatgtcctacttttccctccaatcaccttccccacaccttaggccacctgcttctttgtcccataaacgtctctaaaccccatcttcgaggaagtgggtttgagacctgttttcccatctcctcacttggctgc[139 bp omitted]caatgaaaccctgtctctacttaaaaaatacaaaaaattagccaggcatggtggcaggcgcctgtagtcccagctactcgggaggctgagg[139 bp omitted]gtgcgatgagcagaatgggcctcatttggtatcaagaggaggagctgatagaaaatgctcagggatgggctggcaaagacattttcagagcagcgccgtgttatgttctgtgtgcagttgtttgcgctgatgcgttacaagcccctctggtggtcccccgctgagtctttggtaaagtctgctgcatctgccaattcttttgtgagcagatttgttctaggggtgtgggggactaagaaaggggtggaatataaacagtgcagtgtaaacagtgcagtataaacagtgcagtataaacagtataaacagtgcaaacagtgcagtgtaaacagcgcagtgtaaacagttttacccacagaggctgcaggcccattgctgaccatggaaaaagaggtgggctcctcgggagtccacagaagtcctggggagggctttggacttcggcaggcctggaatgagggttcgaactaatctcagtctagatctcgagggtctgagaggctgtagagaacatttaggccggttggcatgagcagttcttgccccagttcacctctaattccccgactgttgctgttcatgctaagtgaggccttgttcccactcgttcttcttctttttttttttttgagatggcgtcttgctctgtcacccaggctagactccactggtgcaatctcagctcactgcaacctctacttcctggttcaagctattctcctgtgtcagcctcctgagtagctgggattaccgacacgcaccaccatacccggctaatttttgtgtatttttagtagagatggggtttt[142 bp omitted]catgtggatagtcactggcaacttaaaacccaagtgtgcatggggaagtgcacggcagggtcattaaaaggagtccagcctctcttcttcccttctctatactttcacttctggaaaagaccggaaaccttgcctcattcctctttctcccatggccccatccccaccccgcttcagcccatcagcctccaaatgtagtccaagtcctcatctctgtacctggaccattgcattttcgctggcccctagcccccactgggctccccactggctgccaaataccagtgtgaccctgtcccttccttgctttaagcctctcagtagtttgtttgtttgtttttgagatggagtcttgctctgtcaccaggctggagtgcagtgacataatcttggctcactgcaacctccacctcccgggctcaaacgattctcctgcctcagcttcccgagtagctggggctataggcgcccaccaccatgcccagctaatttttgtatttgtagtagagacagggtttcaccatgttggccaggctggtcttgatctcttgaccttgtgatctgcccaccttggcctcccaaagtgctgggattagaggcgtgagccaccatgccccgcctgcctctcagtagttatttaccactgaagcagagtgaagcctgtgctccacattgcttcatggccaagacctcagggacaagtggacacaccaggcagtgggagtggatatggcaaagccaaacccagatctcttctcaaaataattttccagagggcaaaagcagatggctacaccgagaactcacgccagcccaacacactttgatctcgaggcctctggaagggaaggtgcctaatgaactactgaaagccagagatgcaatgacaaaggtaccaagactggaggtgat[132 bp omitted]actccgtctctactaaaaatacagaaattagccaggtgtggtggcgggtgcctgtaatcccagctactcaggaggctgaggcaggagaatcgcttgaacccgggaggcggtggttgcagtgagccgagatcacgtcactgcactccagcctgggcgacaagagcgaaactccatctcaaaataaaataaaaataaataaattgacacagtcagtgcctcgctcccacccccacctccagcatagcaccatgacagtcttctcacataacaagtcccaaaacacaccatcggcatccagaaagtgagagtaactcgttacagttgagacctctcactcccggtcattatctcatttcaatccaagaggtagacttcttcatcgcccctgacatacacatgaggaaaaggcccagagaggtgaagtgatgcctcaggtcactcagccagttaccagtagagcagatccttcaatgcaagtttttctccaaccctacacagcagtcgtaccagggccccaggctgcaatcccctggcccagtgctgatcggtggctcccagggacacgccctgatgccagcgctggcagatgtctgctgtgaagagagcaggaaactgtcccttggaaagctgagatgcttacctgaactgtgaaagtatccatatgtgagcagctaaggagacagcagtggctggagtgctgcagctcaggcacagctggtgagaggcattcctcactcacaggccttcacccactgctagagacagtgagccccatcctgaccacttcccctttctagtcagcccacggggcagagaccctggcgtcatctctaggcaaccatcccttttccagggaagctcatgacccacggctgtccagaagccagaatcttctcactgccccgtgtcgctcccgcaaggcctaccagaggaccctcatggtgtggtagggggtcctggcaggggccaggggccagggtggagacttggcagtgggggtgggtttggtgtccccacagacgagtttgccgtgagcattcctggatgtggcaacctcagtctcaagaagagcgacaggacgccagctcccatgcagagacagatccaggtaagaaaccagctcatgtgtgacaaactcaccatctcaccatgaaggtgactcttgaaagctcctgtgcaccttggaactgctgagacatcttctgcttggaggaggcaagggacaggcttcctgtttctaaaggcgtgtgagtggcgaccttgagaaatgtggccagtggagcattttgactgagttgggtcccctcgtgcaatactgtgagacagaactcccagcgaggcccacggcctctgaccatgggggttggagtggggaaaccaattagccattttgttgaattggctggttctgactcaaatgagcagtcacattagtaaaaataggcaaacggatgtgcattgtatttgcccagagcgaatgagttgttatccatttcagtaataatgataaccagatatgtctgataaatatctgataatgtctgatatatgtctggtaaatttaacaaacaccgggctctggctgggtgcggtggctcacacctgtaatcccagcactttgggaggccaaggcgggtggatcacctgaagtcagtagttcgagaccagcctggccaacatggtgaaaccccatctctactaaaaatacaaaaattagctgggcattttggtgtgaaccggtagtcccagctactcaggaggctgaggcgggagaattgcttggacccgcgaggtggaggttgcagtgagccaagatcacaccattgcgctccagcctgggcaacagagcaagactctatctcaaacaaacaaaacaaaacatctggctcagaagattcctgatttgcagtgtttactaatttcttttttctttttctttctttctttcttttttttttttttttttgagatgcagtctcactctgtcgccaggctggagtgcagtggctcaatctcagcacactgcaacctccgactcccaggttcaagcaattctcctgcctcagcctcccaagtagctgggactacaggtgtgtgccaccgcatccggctaatctttgtatttttagtagagacagggtttc[131 bp omitted]atccaaagtttagctgctaaaaaaccttcctaaaagccaatttaaaattttcttctaggccgggcacagtggctcacgcctgaaatcccagcactttgggaggccaaggcaggcggatcatgaggtcaggcgtttgagaccagcctggccaacatggtgaaatcccgtctctactaaaaatacaaaaattagccaggcatggtggcaggtgcctgtagtcccagctacttgggaggctgaggcagaagaatcgcttgaacctgggaggcggaggttgcagtgagccgagatcgagccactgcactccagccggggtgacagagcaacactccgtctcaaaaaaaaaaaaaaaaaaaattctcttctgaggggtgaataaatgcttctgtggatagagctcatcctaggctaacaaagctgtgacttcttggtttgtgtttcattcattcattcaataaattactcaataaattattttgctaacctttaaggacctcagttcagctgtgatatagtaaactctgtagccctactatttctaacaatgccttttgcacagcaagttcaagcctgaggtgtcaggtgatcagaattccaggcccggtttgacaaaactttctttgtgaatccttcccttctctgagcctcagtttccttgttgtaaaatgaaagaattcaattgacaaatatgaaagtgctccagggattttgccatctgccttcaagaaagtcccgcaaagtgtaggaggaagttgaagccataatatgatgcaggctaaatacaatgaccttcaatttgtgccagaccctgtgctcaacaagtagagactcagaactgggcaagtcattcatgggtagagcacatggcacatgttctacaggacagaaggcacataagttattactatgcaaagtgatgaatgctagtgctgtggaagcacaaaagtgggagagaagaaagggtctgagtggtagcatttgaactgggccttgaaggatgtgtaggagctcaccaaatggacagaatgtggacagacacaaagcagccatagtatttggagagaaagagatggttgcatggctgatcaagagtgaatgtgttgggcagtcagaggcttgagagcaaagtttagggacacacaccacggcatctggatctacccacttccttgctatctacattcttccccgactccaccatttgtctttccaccacaagaggagggcaggaagttggggcggttgtgttctttctgcacatctgaaatgccacctgctggtctgggcaactaaagaggtccctgagggccctagattagcggctggaccagagggtgtcaaggagaatgaagggcaccctctagtggtcacctgtggtgctttctcctcaggattctggtccctctgacctccccgtagggatggctggacacacaagatgttcacctcttaaagctacagagaccatcaggctagaggacactcagaagggattccagtccacccttcatctcatgactcaacctttttgtcaacatccgggtggcacccagcttctgccgttttgtttcttctcactcagtcatctaagtcatgtgtaaaatgaggtgttattctttgtgccactcacaagtgtcaattaatccccatcatgagaaaaaaactgaagaaagagaaatcataagatacaacatataattagaacattaatagattttattgcagtttttaaaaaggtgggggtttttgtttgtttttgtttttgtttttgagacagagtttcgcccttattgcccagactggagtgcaatggcgcgatcttggctcactgcaacctccacctcctgggttcaagcaattctcctgcctcagcctccagagtagctgggattacaggcatgcgccaccatgccctgctaatttcgtacttttagtagagatggggtttctccatgttggttaggtggctggtcttgaactcctaacatcaggtgatctgtccacttcagcctcccaaagtcctgggattacaggcatcagccaccactccgggcacaataactcatctttaaagagctctgagagcaatatgggtggccaaagcactcaggtggaaccagaagtcatcactaagcaaccgtggctgctttgtttgtccctaacaatagccaagcagatgttgtagctcctctgtctcccaccctggccccatgacattgaggtggggtcgttccagctcagatgtaaaaaggcaagtgtataagtatttggggttgtggcaggaggcagccgtgtcttgtgtatgaagggagtccctgcccacttctccccatttctggaggtaaagattcccatgaaaggtactaggagcattgggcccctaaaccccagaacccatgagtatgttattttagatggtgaaagggattttgcagatatgactaaggattttgaagtggggaagtcatgcaggattatcgacatggaccccatgtaatcacaagatccttctgagagggatacaggagagtcagggtcagtggcaggggatgtgctggcagaggcaagagactggggagatccgaagaaggggtctcgagccaagaaatgcaggcagtctcaaggagctggtaatggctgggcaatggattttcccctgggacagggatggagagacagcagtgatttcagttctcactcttgaaccttctctcttcttcgttcccaaacatgagtccaccagccccattaccactcaactgactgggagccacatcaaccataactcttatgatttaccagttgtaatacttaagcattttctgtggcctggcaatttatttatttattcatttatttttgagacggtctcaccctgtcactcaggctggagtgcagtggtgcagtcgtggcccaacgcagcctcgaactcctgggctcaagcgatcctctcacctaagcctcccaagtagctgggaccataggcatgcaccaccacacctggctaatttttaaattttttgtagagatgggggtctcgctatgtttcccaagctggtctcaaactcctggcctcaagagattttaccgcctcggcctcccgaaatgctgggattacagacatgagccactgtgcctggcctggcaatttaacccaactcagtcatctctcctctggacactctccccatgacatactttgcaatggttttaaaatatgctcatacatttttttgacactcctcccattgagctgtgggaatctatgtcccctctactcaaaagtgggctgacgttagtgactcacttataacactgactgtaggggaaggaaagctgcttaacttttgagga[133 bp omitted]ggctaccccatggtcgagccattgtgacccctgtgacccacacgttacaggcctcctggagtcacaaagcctggagcaacaggagaaccactaaagaagacggaacagctagttcctgccttaatgattaaccgaccttgcaacagtccaccttgtgatatgttcctgcccttccccaactaatccatccaccttgtgatatgttcctgcccttccccaactaatccatccaccttgtgatatgttcctgcccttccccaactaatccatccaccattgtgacatgttcctgcccttccccaactaatccatccaccattgtgacatgttcctgcccttccccaactaatccatccaccttgtgatatgttcctgcccttccccaactaatccatccaccttgtgattgttcctgcccttccccaactaatccatccaccactgtgatatgttcctgccctaccctaactaatccatccaccttgtgatatgttcctgcccttcccccaactaatccatccaccactgtgatatgttcctgcccttccccaactaatccatccaccttgtgatatgttcctgcccttccccaactaatccatccaccactgtgatatgttcctgcccttccccaactaatccatccaccttgtgatatgttccttccctaccctaactaatccatccaccttgtgatatgttcctgcccttccccaactaatccatccaccttgtggcatgttcctgcccttcctcaactaatccatccaccactgtgacatgttcctgccctaccctaactaatccatccaccttgtgatatgttcctgcccttccccaactaatccatccaccttgtggcatgttcctgcccttcctcaactaatccatccaccactgtgacatgttcctgccctaccctaactaatccatccaccttgtgatatgttcctgcccttccccaactaatccatccaccattgtgacatgttcctgcccttccccaactaatccatccaccattgtgacatgttcctgcccttccccaactaatccatccaccttgtgatatgttcctgcccttccccaactaatccatccaccttgtgattgttcctgcccttccccaactaatccatccaccttgtgacatgttcctgccctaccctaactaatccatccaccttgtgacatgttcctgccctaccctaactaatccatccaccactgtgacatgttcctgccctaccctaactaatccatccaccttgtgatatgttccttccctaccctaactaatccatccaccttgtgatatgttcctgcccttccccaactaatccatccaccactgtgacatgttcctgccctaccctaactaatccatccaccttgtgatatgttccttccctaccctaattaatccatccaccttgtgatatgttcctgcccttccccaactaatccatccaccttgtgatatcgtgccttatgacttcccccaccttgtgactatgcaccttgtaacattcttcccctgcccaaaaaaactgcccctaactgtaactttccactacctaccccaaacctatagaaccagttccactcccaccacccttcgctgactcctttctctgactcagcccacttgcacccaagtgaataaacagccttgttgctccactaagcctgctcaggtggtctcttatacggaggcgtgtaacagccaagatggtgaaacactgtctctactaaaaatacaaaaattagccgggcgctgtggcgggcacctgtaatcccagctactcgggaggctgaggcaggggaatcgcttgaacccaggggtggaggtttcagtgagccgagatcaggccactgcactccagcctgggcaacagagtgagactccatctcaaagaaaaaaaaaattatgaagtttccagttcgtcctcttaagattcccactcagtgggagggggaagccagctaccacataagaagtccagctactctgagaccccgccatgctggagaagccatgcagagccctgggttggcagccccagctgagctacctggacacaacccatgccagccatgtgagtgagccatcttggacgtccagccctgtggggccttcagatgacatctgagcagctgctagggaaacactgagtgagacctgccaggctcagtcctgtctaaattcctggcccacaaaatcatgagcaaaccaagtggctattttaagtcaacaagatttgcagtaacttgttacacatccgtagtggctggaacaactttttctctaccctcttgccccacttccacgcctccaggggcaaagcataacgcccattttgctgcaaacagcgtgcctggtcggcctctctatcacagctgagtgcacacctgttatcttgccttcccaggacttcactccctcttcggtgaatagcaatcctttcttttgaggaaatgtccccccactgcccaccctctttatcaatcacattgctttcggtcagagctgccactttcctgttttcattccccactgccacatgggaatgcaggtggcctctaggaggtgaagaaggcagggaaataggttcttccccagagcctgcagaaagaacctgcctgccaatacatttcagactgctgaactttagcacctccagatctgtaagagaatatcaaacgtgtgatattttgctacagca[133 bp omitted]gcaacctccccatcccgggttcaagcgattctcctgcctcagcctcccaagtatctgggactacaggtgtgagccaccatgcctggctaatttttgtagtttttagtagagacaggatatcaccatgttggccaggctggtctcgaactcctgacctcaggtgatccgcttgcctcggcctctcaaagtgctgggattacaggtgtgagccaccatgcccggtctcagtacttttttgtttatgtctaagtcagttccaggaaggctgccaccatttgctaccaaaacaatccttacacaacaatagcaagtctccttccatctcctctattctggtccttgaaaccttatcaatggtgaggtcacagtcattgtttgttgttcggttgagaactgagggggtggggtaggaggaagaaggtctatttttaaaaatcacacacactaaaaaaggttcaggctctgagaacctgtgaaatcttgactaattttggctttccccatgggaacccaccagaaaagtattcaaacttgtatagaacacccttgacgtaactaactccatcttagaaaaatactccattttatatttcatacagcactttgccaattaggataagatgttttgcttaagaaacaaatttaaaaaaaaaagactgcatccaaccagataaagatacaaacaagcacactcttccaccatcagttctcatcagaggactctgtaactataaaacatcaggccttggctggctgggtgcaatggctcatgcctgtaatcctagcactctgggaggccgaggcaggtggatcacaaggtcaggagttggagaccagcctgaccaacatagtgaaaccccatctctactaaaaatacaaaaattagccgggcatggtggcgttcgcctgtagttccagctacttgggaggctgaggcaggagaattgcttgaacccgggaagcggaggttgcagtgagccaagatcatgccactgcactccagcctaggtgacagagcaagactccatctcaaagaaaaagaaaaagaaaaagaaaaaaaagcaggcctctagcagcttgaaatagccataactcatcatcatcactcatgataagaactcagcatttggctgggcgaggtggctcatgcctgtaatcccagcattttgggaggccga[133 bp omitted]gaggcagaagaatcacttgaacttgggaggcggaggttgcggtgagccaagatcacgccattgcactccagcctgggcaacaagagtgaaactccgtctcaaaaaacaaaccaaaacaactcagcatttgacccccaaaagctcggccacattaaagactcctccttgcaagatctaacggggcccagagactaccagaccaccagaccaggactcctttggtcttcctgctccccctggactggttccttaaccctttctcctctttttcctcttgatgttaaatgttactttgtttgttgtgggatgtttactacataacacttatatatcaattaagtatgttattctgtacggtttgcagtattgacttaattattgtggactggctggagcctgtgtgcccgcagctgactactgagtgatgggaagtactaaggagaattgcctccttgggaactccacgtagcctgtggcttttgtgatttaagtagcatgaataaaagcgtgacactgtggaaagacgcaaacacacgtggacctggttatctgtaaccttgtaccgctcatgacaaaattagcaaatcgttttctttaaaaaaaatcatggtaaaatgtatgtaccataaggcttattttaatcttttttttttttaattttttttttgagacggagtttcgctcttgttgcccaggccggagtgcaatggtgcgatctcggctcaccgcaacctctgcctcccgggttcaagcgattctcctgcctcggccttccgagtagctgggtccccaccaccatgcccagccatttgtatttttagtagagatggggtttcactatgttggccaggctggtctccaactcctgacctcctgatccacctgccttggcctcccaaagtcctgggattacaggtgtgagccactgcacccagcccagaactttttcatcttcctaaagtgaaacactgtaaccattgtccactctctcctgcccctggtagcaattctttcttgaaaaaggctaaagtaggccaggcgcggtggctcatgcctgtaatcccagcattttgggaggcggaggcgggtggatcacctgaggtcgggagttcaagaccagcctgaccaacatagagaaaccccgtctctactaaaaatacaaaattagccaggcatggtggcgcatgcctgtaatcccagctactcgggaaggctgaggcaggagaatcgcttgaacctgggaagcggaggttgcggtgagccgagatcgcgccattgtactccaccctgggcaacaagagcgaaaactccgtctaaagaaaaaaaagaaaaaagccaaagtaggccaggcatggtggctcacgcctgtaatctcagcacttagggaggccgaggcgggtggatcacctgagatcaggagttcgagaccagcctggacaacatggtaaaactctgtctctactaaaaatacaaaagtgagccaggcgtggtggtgggcacctgtaatcccagctactcgagaggttgaggcaggagaattgcttgaacctgggaggtggaggttgcagtgagctgagattgcaccactgcattctagccttggcaacaagggcgaaactctgtctcagaaacaaaaacaacaacaacaaaaagataattttaaataaaagatagaactatgaatctcatgaagatataaaaatgaacgccagcctggccaagatggtgaaaccttgtctctactaaaaatacaaaaattagctagacgtggtggtgggcacctgtaatcccagctgctcaggaggctgaggcaggaggatcacttgaacctgggaggcagaggttgcagtgagccgagaccgagccactgtgctctagcctgggcaacagagcaagactttgtctcaaaaaaaaattttttattccacttattaatcaatgagggaagaaagccactgcagcctgggcaacagagggagatcctgtccgaaaaaaaaaaaaaaaaaagaaggccaatgttataagaggtttaaaagaaaatccaaagaccagataacatttataaatcaaggttattgaaacaaattgagatagagcagggacccgttttaggggcctgagagcccttttaagcatggaaataaaggaaaatcttgagttccttcaaagaaaattccaggcacctagctagccctgagaagtaaatgagtaacttgataagcaggaaggtaatagtagcttaaaacaatagccaaggccaggcgcggtggctcacgcctgtaatcctagcattttggaaggccaaagagggaggatcacctgagttcaggagttcaagaccagcctggccaacacggggaaaccctgtctctactaaaaatacaaaaaaagttagctgggtgtggtggtgggtgcctgtgatcccagctacttgggaggctgaggcaggagaattgcttgaacctgggaggcggaggttgaagtgagccaagattgcaccattgcagtccagcctggatgacagggcgagactctgtctcaaaaacaaaaaaacaaaacaaaacaaaacaaaacactaacaaaaaatagccaaggaagttagagtgaggagacgttttgttacccatgtccctgagttgtttttcagaaatccggacacccaccaaatggatctgctggcccgtagacttcagataagggcagctgagaactgaactctgacttctggtctttgttccaaatttcttcctgaggggcctagaggaagtcatgcccaggagccagagctaacattcttttctgctgaccccaaatttttagacaaagcttcgcctcctgaaccaattgcaaatcagaaaatctttgaacctacctatgacctgtggtctccctccctttgagatgtccctcctttttaggtaaaatcaatgtatagcctgtatgtattgatttacaactttg[137 bp omitted]catgatgaaaccccatctctactaaaaatacaaaaattagccaggtgtggtggcgcatgcctataatcccagctacttgggaggttgaggcaggagaatcgcttgaacccgggaggcggaggttgcagtgagccgagatcacgccactgcactccagcctgggtgacagagcaagaccctgcctcaaaaataaataaatataaaaaataaacacctttgtctgtaagccatcagaaagttcaggtcttaagcaggatctgccagattctcctcgcttggcaccctgcaataaatgccccactttctctggctgcaatcctcatgccagtgttttagttttgctgggtcaggcaggcagacccaagttcatttgggtagcaggacgagcaaatgtaagcaaactgttttttaacaaagggggtagggaagaaaatcaatgcaacttctataggactggacagaatatccccctctataaacaagaattatttttgcattgctatcagtcatccatactttacagagaattgagatcagataacccagaaatagatcctctagaacaggggtccggggcctgttaggaactgggctgcatagcaggaggtgagtattgggtgagtgagcgaagcctcatttgtatttacagcttcttgcatgactgcctgaaatccgcctcctgtcagatcagcaggggcattggattatgataggagtgagaacaccattgtggactgcgcatgccagggatctaggttccgcgctccttatgagaatctgatgcctgatgatctgtcactgtctcccatcacccccagatgggactgtctagttgaagaaaaacaagttcagggctcccactgatgctacgttacggtgagttgtataattatttcattataattacaatgtaatgataatagaaataaagggcacaataaatataatgagcttgaatgatcctgaaaccatactctgctgctccatggaaaaattgtcttccatgaaatcagtccctggtgccacaaaactagtccccgatgctgccctagagtttatatactgcacagctttctgacgaaacacaaacttccctctctatgagagatggctgaggctgagaaattcgaaagaagatcaggtcagtagaccttttttttttttttttcagacagagtctcaccctgtcgcccaggctagagtgcagtggtgagatctcagctcactgcaacctccgcctcctgtgttcaagcgattctccagcctcagcctcccaagtagctgggactacaggtgtgtgccaccacgcctggctaatatttttgtatttttagtagagacagggagggtttcaccatattggccaggatggtctcgatctcctgaccttgtgatctgcctgcctcccaaagtgctgggattacaggtgtgaggcactgctcacacccttttttttttttttttttttttttttttttttttttgtgatggtctcactctgttgcccaggctgtggagtggcatgatcatggttcactacagcctcaaactcctggcctcaaatgagcctcccaccatagcctcccaatagctgggactatagccatgagccaccctgcctggccaggtcagtagaacttctgagagaaaaggggcttcaggagcagtttgtagaccaagaacaagagccctcatatttctgagagatactagagcttccgctgctagattgttacctataacctgggtttcctgctgaatttggcaatgaacctctttgatgtgatagatctcagggcttgcgtcagggacagccaggaagggaggaggcagaaagcaaggctggatcccagagactctgtgggcaagaagcctctcaaagccacaaggcagggcccccgtagagcgggagcagcctttgatattctccaggccagggaggcctttgcattccagaactgaaccggaaaagacaaggttacctcaaaggagtcccagggattccctaaagaaggactctggggagtctgtgagggaattccagctgcgtgggggcatcctggagccctcacgaaaaaaggtgtggggagctctgcccacggtctctgccctgtcactcccaaagctgagtggggagaag[135 bp omitted]atacaaaaattagctgggcgtggaggcgcgcgtctgtaatcccaactactcgggaggctgaggcaggagaatcgcttgaatccaggaggcggagtttgcagtgagccgagatcgcaccactgcattccagcccgggggacagagcgagactccgtctcaaaaaaaaaaaaaaaaaaagtacacacttcagtacccactgaactgaagagagtttcaaaaagttacagcctggctggtgctgccaaaccctgcctctaccttcatccagactcgtcctgggatgctcagtagatattataaattgccaaaaggttggaaacattctcacttctaccaccagatggcggccatcatcccttcatcggctaattgttaaaccagacaagaagcccttatacccgcatctcacacccattaggatggctactagacatacacacacacacacacacacacagagagagagagagagagagagaaagagaaagagaagagagagagagagagagagagacaaagaatctgcctgtgcactcttggtgggcatgtaagatggcacaactgctatggaaaacagtatggaagttcctcaaaaattaagattccatgtgatccagcagcaattccacttctgggtctgtactccaaagaattgaaagcaggagctcaaagagatatttgtacatccatgttcatagcagtgttattcacaatagccaaaatgtggaagcaacccaagtatccaccaatgaatgaatggagacacaaaatgtggttatagaaatacaatggaggcccggcgccgtggctcacacctgtaatcccagcactttgggaagccgaggcaggtggatcacctgaggtcaggagttccagaccagcctggtcaacatggtgaaacctcgtctctactaaaaatacaaaaattagcctggcttggtggtgggcgcctgtaattccagctacttgggaggccgaggcaggagaatcgcttgaacccaggaggcagagcttgcggtgagccgagatcgcgccactgtactccagcctgggtgacagagtgagattccatctcaattaaaaaaaaaatacagtggaatattattcagccttaataagagaggaagttctggtacatgcgacaccaggaatgaatctggaggatgcaatactaaagtgaagcaagccagacataaaaaataaacattgtgcctgagcgcggtggctcacgcctgtaatcccagcactctgggaggccg[134 bp omitted]gaggcaggagaatcacttgaacccgggaggcagaagttgcagtgagctgagatcgtgccactacactccaacctgggtgacagagcgagattctgtctttaaaaaaaaaaaattgtatgattccacttatattgaggtacctaaaattggcaaattcatacaaagagaaagtagaatgatggttgccaagtgctggcggaaggggaaaaaaattcgttggtaaaattggaatcatatttcacacatcaaaactaattccagattttagttaaaatttaaatgtaaaaaaataaaacaaatattcttaaatattcatgtcatgaatagtaaatataatttgtcttctttatgattttcttttttctttttctttctttctttttttttttttgagagagtttcgctcttgttgcctcaggctggagtgcaatggcgtgatctcagctgactgtaacctctgcctcccgggttcaagtgattctcctgcctcagcctcctgagtagctgggattacaggcatgcgccaccgcacccggctaattttgtatttttagtagagatggggtttctccatgttggtcaggctggtctcgaactcccgacctcaggtgatccacccacatcggcctcctaaagtgctaagtgctaggattacaggtatgatgagccattgcacctggccttttttttttttttttttttgagacggaatcttgctgtgtcgctcaggctggagtacagtggtgcaatctctgcccactgcaacctctgcctcccaggttcaagcaattctcctgcctctgcctcccaaatagcttggattacaggagcccaccaccatgtccgactaatttttgtatttttggtagagatggagttttgccatgttggtcaggtggtctcgaattcctggcctcaagtaatctgcctgcctcagcctcccaaagtgctgggattagaggtgtgagccactgcacctggcctatgattttcttaataacattttcttttctctatcttactttactgtaagaatacagtatataatacatataacatacaaaatgtgttaatcgattgttaatgttattggtaaggcttctggtcaacagcaggctattagcagttaagcctactattgaccagaagccttaccaataacatgtgggatgtcaactgcaccaggggttggcacccctaacccctgtgttgttaaagggtcaactattcttattttccaacctaatgttgccctcctcagagaggctttgattttatctaaaataacatccctcagtgaaaaattaccaagtattcaataaatctgaaaaatactttcatgatgaagagaaaaatcaattgcaacagacccaggaataacagagatgatgagattagtggacaagagcatgttatgtagagacatagaagatatatagatactgatagactatgtatgtatatatgagtgtatctatcatctatctcttctagagatgaaaagtacactgaatggaatttgcagcagattacacactgcagaccacagattaat[131 bp omitted]agaaacccagtctttactaaaaatacaaaattagccgggcgtggtggtgcatgcctgtaatcccagttactcaggaggctgaggcaggagaatcacttgaacctgggaggtggaggttgcggtgagccgagatcacgccactgcactccagcctgggcaacaagagtgaaattccttctcaaaaaaaaaaaaagagagaaagaaaaaagaaaaaggaaaagaaagtaatctgaagtgaaatacagagaaagacaacggctgagaataaatgacagtgagttgggggataacttccagaagcctaatgtacgtgtaactggagtttccaataaccgagactccatttccaaaaggaggaggtacagaaaaatatattcaaagaaataagggaaaaatttttcctaacttgatgagaatgatacacccgtagataatacacccacccagcaagctcaatgaacccaaagcacaagaatcatgaagaacactaatcaaagtgcatctttttttttttttttttttttgagacggagcctcgctctgtcacccaagctggagtgcggtggcgcgatctcggctcactgcaagctccgcctcctgggttcacgccattctcctgcctcagcctcccgagtagctgggactacatgtgcccaccacaatgcccggctaatttttttgtatttttttagtagagacggg[146 bp omitted]agagaagatataaaagcagccagagaaaaaaacaaatataaaaatgacagcaatcttctttttgggagttaatgtgatgcagaagatgctaaagcaacatttaaaaagtactaaaagggccggatgctgtggttcacacctgtaattccagcactttgggaggccaagtccggtggaccatttgaggtcagagttcgagaccagcctgaccaacatggtgaaatccgtctctactaaaaatacaaaaattagctaggtatggtggcacgtgcctgaaatcccagctactggggaggctgaggcaggagaattgcttgaacctgggaggcggaggttgcagtgagctgagatcatgccactgcactccagcctgggtgacagagcaagactctgtcaaaaaaaaattaagaaagaaataaagaaaatcgaaataaagaaaatcaaaataaatgaaagttctatcatattcatggatcgtaagactcaatattggtaagatttcaattctccacaaattgatctacaaaatcaacacagttccaatcaaaaccttggtgggctttatttggtagaatgagctgattctaaaatttatttagaaatgcaaagtacctagaatagccaaaataactttgaagcagaataagttggaggacttactacttgattcaagaattctcataaagctacagtaaaaaaaacaatgtgttattgttgcaggtaatacataaatagatcagtgaaacagaaaagaaagtcaagcaatagacctgcacatatatagtcagttgatttttttttttttttgagatggagtctcgctctgtcacccaggctggagtgcaatggtgcgatctcagctcactgcaacctctgccccctgggttcaagcaattctcctgcctcagcctcctgagtagctaggtttacagacgcatgccaccacgcccggctaattttttgcattttcagtagagacggggtttcaccatgttagccaggatggcctcgatctcctgaccttgtgatccactcgcctcagcctcccaaagtgctgggattacaggcacgagccacctcgcctggccatgggtgcggtttatttcatgtcaatcataactcaataaagctgtcaaaaaaaaaaaaaagaaagaaaggtgagcctggggttgggaagggtgagtgtcagtcagaacatggagaactcagaagccagacggaggggtgtagacgatcccccggtgatgggccagcacccgagcatttcagaaaggagtgggttgtgggaagccaacactgtcagcaggatctggaatggattggatgccaaagaaaggagtgtgggcaggagctccttgcaaggtacctactatagtggtgggggtggattctagaaataaaagggggtcatttggaaatgaaggcgaggttagaaaaagaaaaggagggagaagcaactggatccatgacaatttagggcccgtcccccagctcccaaagcagtcatttgataaaccaaatcgagggcagagaaggctcttggaagcttgaaaaaaaattcctgctatgtctgcttctttctggtttctaccctgtgtacagggtcctgtgaccacagctctttctgctgaccgcagctgggtattcctgcctatggaaaaaaaccactcactcggccccgctcactcagcaaaggggcccgtgctcctgctcctgcacccaactggccttcaggactgcaagaggccccaaggggccagctcttcctgctgctctcaggggcaccaccgttaccctgcccaagccaagaactgttttctctctcaagtcaagttcctcctttggtctgccttctatctctctaggtgtaatgtaagccatgaatattcatcctgccaaagagcctggagtcagtacctgacttttctgctcacttcctctctaccttggtcctacctcagtttactcccaaaatgctgcacctaccactatgccctgattaacagatgaccccatcaggtgacaggaatctaaatataactgtggctgggtggctgacttcctgtgtgtgctcaaggcaagagactaggaattgtgccttcaccaagcctgtagatccagatccttgctgcctgagacagccctcagggtacaagcttgcaatctgatgacagagagaaggggaagggagaagaggggtgtgtggtaggagacagcttggtccagagaaagatgggtgccaaaaccaaggccagaggcaaagtttagagccttgaaaaatgactaacatcagtaagggatgggttcctgtaaactttattctacctaatgaggaatctgcgagcctttgattgacatcataatagtaaacttgtgcctgaataccatgcccaagccaactgtttcattctttcttccatttatttattcatccagcaaatattcattgaaaccctggtggctccagactgaccaacatggtgaaaccccgtctctactgaaaatacaaaaattagctgggtgtggtggcgcatgcctgtaatcccagctactcaggaggctgaggcaggggaatcgcttgaaccggggaggtggaggttgcagtgagctgagattgtgccactgcaccccagcctgggggacagagccagactctgtctcaaaaaaaaaaaaaaagaaactctggtggcagacctacatcctgccttcaaggagtgggccccaaaaaataaaactaaaaattacgaacaatatgaaaagggctccaaaggggtcttcagcccagatctggcagaggttgggtcagggaaggtttgttagaaaagattccattcacactcaagtcccaaagggtttgtaggaataagctgagagaggtgtgccagggtcggacagatgggctgggaagactctgagggagcagtaagcagtctggatattgggcacttagggtgaaatggcattgggggccgggatgaggtgaggcaaggctgggcatactggcaagttcctaatcttgaatgccttcattcactcactaactcaccgaacaaatattgattgattgattgattgattgagacaaagtctcaccctgttacccaggctggagtgcaatggcgtgatctcagctcactgcagcccccgcctcctgggatcaaatgattctcctgcctcagccttctgagtagctgggattacaggtgcctgccaccacgcctagctaatttttgcatttttagtagagatggggtttca[131 bp omitted]gggtcacacattgtgctgggatcaagaatagttttggcactttgggaggccaaggcaggaggattgcttgagcctaggattttgagaccttgtctctattttttttttaattagctgagtgtggtggcatgcacctgtagtcccagctgctcaggaggctaaggtgggaggatcacttgagcccaggagttggaggctgcagtgaactatgatcaagttgctgcactccagcctgggcaacagagtgagaccctatctcaaaaaataaaaaatgttttaaaaaatagtcctggattcattaagaaatttgcaggcattggaatgatctcctgagttaggtgattttaccactaacaacaaaacatttttgagcacacgctgccaactattccaattatttgtttataattactcatacgactattattatttttctcaggacagactatatactgaaggtgaaaggcattgttagtgataagggatgtacaaatgtattgcaaacactctttttgataatttctctcactccctcttgctcatttgccagatttttggcagatctgatgagatcatgtttttacctataatgtggctaacgaaggacttctattatgaagagaagaagcatcaggtctgctatttccttttttgtggcttgtgctggctttattagtttatattcaatctgtctatctttgcaagccccatgtccagtttttgagggttgggttagtggtaacgataatataatcagaaaagctcagccgggcgcagtggctcacacctgtaatcccagcactttgggaggctgaggcaggcagatcacgaggtcaggagatcaagagcagcctggctaacatggtgaaatcccatctctactaaaaatacaaaaaaattagccgggcatggtggcatgagcctgtagtcccagctactcgggaggctgaggcaggagaatcgcttgaacccaggaggcagaggttgcagtgagccaagatcgtgccactgcactccagcctgggtgacaaagcgagattctgtctcaaaacaa[133 bp omitted]aaccccgtctccactaaaaatacagaaatttagccgggcgtggtagcgggcgcctgtagtcccagctacttgggaggctgaggcaggagaatggcgtgaacctgggaggcggagcttgcggtgagccgagatcgcaccactgcactccagcctgggcaacagagcaagactctgtctcaaagaagaaaaaaagctgtttagctgcatccatttaagctgcaatgcaacacagtatggtaaaggcaatgaccccacttgctgttgtgtcccctacctgcaggcaggcttcccctcttccatcagacactgtgcacctggccctacccgaggtgatctgagctacacaccaggatgtcagtgccaaactgcaaaatatatatcagcccgatttgatgtatgtcagtcttgctacatttaatacaaaatcacacgctagtgggtcatttcgtggatttctggaaatagaacccaggcccttggcagctgctatctcttatgtcagaggtggaaaaagctctgatgtagcctatagcaggtattgaacatgagatccttgattttcctgcctaatggc[153 bp omitted]taaaaatacaaaaattagccaggcatggtggcacgggcctgtaatcccagctacttgaaaggctgaggcaggagaatcgcttgaacctggcaggcagaggttgcagtgagctgagtttgagccactgcactccagcctgggcaacagagcgagactccatttcaaaaaaaaaaaaaaaaaacttctgtttttttcaaagctcaattaacaactttttcttaactaatttattactgaatttaatgaaggtccatcctcattggctaagtgatttgcattatgtaaacatagaaaaatttcattactgccttgtaggaacttaaattagaagaaaaaccaaactcacagaatgcagcggcggcagcagtagcagaataatagtattctgaaaaagggttggacttactgccacaaaattctgattatagacttggcagtcactcattctctgcgtccagccttcagcttttggaggctgctttcttcatttgcaaaatggagactagaaaacaacaaaacaagacaaaacaaacaacaaacaaaaaaccactaatgcatgaggtctgaaaaacaaaggtgggattgctgagagtgaagggaagaataatgagccaaggtaaataaaatgagaggttaggctaatgtatacacctcagattccacccgctttactctcttccatagtccacaactatatgctggagaatgaattgacactgatcactgaaggaaaagcgtagttgcatgacggaaaggatgaccacaatcatctcacctctccaattcaataacgatcttaaggtgctatcatatgcaatgagacaagaaaaacaaacaagaggtccatttgctagaaatgtagactcaaaattataagactcaaaactttaatccaaccctggtttaaaacaacaacagcaactattggtcacaataatatttgataagaagcctggagaggaaacctatttttgccaaaattatttgagaatgcaagtgttgttctggttgttatcatgttggcaagagaaggaagaaaatgttaggccaggcacagtggctcacgcctataatttcagcactttgggaggctgagatggacggatcacttgagcccaggagttcaagaccagcctgggcaacatggtgaaatgctgcctctatgtaaaatttaaaaagtaagctggacatggtggcatgcacctgttattcagtaggctgaggtggaaggatagattgagcctgaaggctgcagtaagccataattgtgccactgtactccagcctgagtgacagaacaagaccctgtctaaaaaaagaaagaaaaagaaaaggttagcactgttggggattagccaggtgtcaccaaagatctgatttataattaaactatacttgcttgcttctttgtcactgcgatgacagttcctctcagcatgtttactcgtcttcagggagaaggaagtaaagaggctccaagagatattaatctgttagagtccaagaggttttttgtttttgtttaatctcacaggaatgcaagctttaaccacgagtttgggaatcataaaacttgtggccgggcgcggtggctcacgtctgtaatcccagcactttgggaggctgag[266 bp omitted]tatttattatggcaaattgtatttgctcatttaggccccaaaatatgcttgtaaaaaattgaacttgcccactcaacttgtaaatgaattcagtggttttatgataattcatgtgtcattttataaggaggtattcacattgcatagacattgatgggctcagtgaatggctgggatagctggagaaccaggtttgaggttatgtagtaaaaaccacaaccaaaattatgatgtagaactggtctggtgaggatatctctgctgcattccagaggggtaggtgctggaatgatgctgctgatggcactgggaactgcaggccaccactggcactgttgccactactgccaccatctctaccgctgccagtggaggtgttccactgctcctgtttattcctgagctccaaatgcaaaatttaagatagtgcatctgattacatacacctaggtcatgtgctcagtcctagctgcaaagaaggttgggaaagtaggtatctggcagtttcagcattgatgttgggaggacagttatgccattcaccaggcctgttaggatggggaaaggggttccaatgggcagatcacgaggtcaggagttccagaccagcctgaccaacatggtgaaaccccatctctactaaaaatacaaaaattagccaggcatggtggtacacacctgtaatcccagctactcaagaggctgaggcaggataattgctcgaacccgggaggcggacgtcgcagtgagccgagatcatgccactgcaccccagcctgggtgacagagtgagactctgtctcaaaaaaaaaaaaagaaaagaaaaagacaggggttctgagtgtgagcagccagtaagagtaatacaagagtaatacgagtctaatatatctggttaagcccaactatccttactctgcacctgtgcccaaacaagtgaatgtcgtaagcaaaatcacttctccatgcagattaaatcattttaaatttatgacctcaagtctcaagtgaactgcaacacagccagactattctatttctatccactttctaataaactaatttttctactttctgaggcactatttcatattactccccccacaaatctccaacatttcctcctcaattcaatggtgtttttgttagtgatccctagagaaaacagatgcaatcagaggaggtctattgatcttctctttccacaaatgcaacctttccactagtgctctgaatccaatcccctctcactgactcagaatttgctcctgtaatcttccctctttttatttttgatagacgtctcgctctgtcacccaggctggattgcaatggcacaatctcggcttactgcaacctctgtctcctgggttcaagcgattctcgcacctcagcctcctgagtacctgggattacaggtgtgtgccaccatgcccggctaatttttgtatttttagtagagacaggatttcgctatgt[133 bp omitted]ggtatagaaacatatcttagctgtgtgcagtagctcatgcttgtaatctcagtactttgagaggcctagtcaggaggatcgcttaagcccaggagttcgagaccagcctggccaatgtggtgaaaccctgtctctacaaaaactacaaatattagccagtgtagtggtgcgtgtctatagtcccagctacttggggggctgaagtgggaggatcatttgagtccaggagtgccactgcactctgggcaacagagtgagatcctgtctcaaaaaacaaaaaaacaaacaacaacaaaaagatgttttaatatcactcatctccaaagacataaaacaaaaacctgcttcaagcccatgtcctctttcaactctcgactctgttctctttccaaatcaaccttgtcattacagtggtctattctgttctcattcttcctcatctgcaactttttctcaagccacttcaattgggcttttgttctcattatttaatcaaggtctttaatgacctgtacatcttgccaaaaccaatgtttgcttgtttaatttttctgttggcatcttattgaacttcttagcagcattcgaagcagttgaaaactttgtccttcatgaaatacattctttttgagcttccatggcttcaagcctccctggtttttctccttgtcaatctacttggcttcccaggactctgtccttagcagccttctctcctctatctacattcactccctaagtgatttccagcccctttgcttaatttactttttccatgaattttatcacatttcacctttatcatatttctcttattttgaaaaatctcaaacttaacaaaaagtaggaaaaataataactatgaacacccatatactcttccataaaattcataaattgctaatttgccaacatttgtgcacatcctctttcttccttttttcctcacctctccccattgtcccacagagtttactttttactggaacatttgaaatcaagttagtttttttttttttttttttttttgagacggagtctcactctgtcaaccaggctagagtgcagtggtgcgatctcggctcactgcaagctccgcctcctgggttcacgccattctcctgcctcagcctcccgagtagctgggactacaggtgcctgccaccacgcccggctcatatttttggtatttttagtagagatggggtttcactgcgttagccaggatggtcccgatctcctgacctcgtgatctgcccacctcggcctccaaaagtgctgggattacaggcatgagccaccgcccccggccagtttgtttgtttgtttttttttctgagacagagtctcacccacttcagcctcccaaagtgctgggattacaggtgcgagccaccatgtccggcctgaagatacttagttgtcacagctggaaaggtgttactggcatccagtgggcaggagccaggtatactgctaaacatcttacaaagcacaggacagttcccaaaacaaagaatgactcagcccaaaatgtcagtagtgctgaggttgagaaaacctagtccagatttatttgattgtttgttcatgattaggttcagattcaacgtttttggttgagaaaactacccgaatgatattacggcctgtaatcccagcactctgaaaggcccaggtgggtggatcacttgagctcaggagtttgagaccagcttggcgaacatggtgaaacactgtctctactaaaaatacaaaaattagccgggcgtggtggcacgtgtatgtcattccagttaggaggttgaggcacgagaatcatttgaacccgggaggtggaggttgcagtgagccgagattgtgccactgcactccaacatgggtgacagagagagatactgtctttaaaaaaaaaaaaaaaaaaaaaaaaagcaatagccgaggccaggcgaggtggctcacacctgtaatcccagcacttcgggaggcctaggtgggtggatcacctgaggtcgggagttcgagaccagcctgaccaacatggagaaactccgtctctactaaaaatacacaattagccgggagtggtggtggcgcaggtctgtaatcccagctactcgggaggctgaggcaggagaatcacttccagctactcagaagcctgaggcaggaggttacggtaagctgagattgcaccactgcactccagtctgggtgacagaacgagattctatcgcgttgataatggagtgccactgcactccagcctgggcaacaagagcgaaactccgtctcaaaaaaaaaaaaaaaatcccagctactcggaaggctgaggcaggagaatcacttgaacccgggaggcggctgtgtcagtaagccgaaatctcaccactgcattccagcctgggtgacagagtgagactccgtctcaaaaaaaaaaaaaaaaagaagaaaaaaaaagcaacagcctagcagccactggaggggacagtgagaggtgagagattggtgccttctcgggtctttcctgggcatgtgcacagccctgcccacgcatgtatccttccagtctcaagaataagtcagagatcatcaaactcctaatgcagagaactgtcactatttgatctatctgtcagctccctgaaaatctctactcctagggcttgtctttatttgaacagactcagaacaggctccatgcaaacgatcctatcctatggcatttgttgaaaaaaaaaaaaaaaaaaaaaaaaaaacagctgcaattgcttaacattgcagctacccaaggtggtaatgccagctggggctaacaagaagatgatcaaagagtttaaaaggaaaagctggggaatgagatgtccatagagggctttgataatctctgacttattcttaggactctagaaggacacatgtacacacagggctgtgcacatgcccaagaaagccctgagaaggccccaaaatctcatctctgatcggccttgaggctatgcacaaacaggaagtgagggataggagagagtcataaactgtctcctggagcattgcaggtgtgatccaacatacacactgagccccttggcaaaagctgtgaagcttattggttcaaggcaattaagaatatctggccgggcaaagtagctcacgccagtaatcccagcactttgggaggccgaggagggcggatcgcctaaggtcaggagttcgagaccggcctgaccaacatggagaaaccctgtctgtacaaaaaatacaaaaaaattagccgggggtggtggcgcatgcctgtaatctcagctactcgggaggctgcggcaggagaatagct[131 bp omitted]atggtgaaaccccatctctacaaaaaatacaaaaagtagcctgatgtggtggcacatgcctatagtcccagctacacagatggctgagataggagggttgcttgagcctaagaggtcaaggctgcagtaagccgaggtcacactgctgcactccagcctgggcaacagag[132 bp omitted]aaaccccatctctactaaaaatacaaaaaaattgccaggtgtggtggggggcgcctgtagtcccagctactcgggaggctgaggcaggagaatggcgtgaacctgggaggcggagcttgcagtgggccgagattgcgccactgcactccagcctgggcagcagagcaagactccatctcaaaaaaaaaaaaaaatctaaaaatataattcagaaatcaattttgtttaaaagggctgaaaacaatgaaatacttagggataaatttaacaaa[137 bp omitted]atggtgaaaccctgtttctactaaaaatacaaaaattagctgggcatggtggcaggcacctgtaatcccagctactcaggaggctgaggcaggagaatcgcttgaacccgggaggcagaggttgcagtgaactgagattgcgccattgcactccagctttggcaacaagagcgaaactctgtctcaaaaaaaaaaaccaaacaaaaaaactgccgggcacggtagctcatgcctgtaatcccagcactttgggaggctgaagtgggcggatcaggaggtcaggagatcaagaccatcctggccaacatggcgaaaccccatctctactaaaaatacaaaaattagctcggcgtggtggcgcgtgcctgtaatcccagctactcaggaggctgaggcaggaaaatcacctgaacttgggaggcggaggttgcagtgagccaagatcacgccactgcactccagcctggcgacagagtgagactccatctcaaaaaaacaaacaaaaaaagagaaaacgtataaaatattgttcaaagaaatttaagaccaaaaaaatgcaaagacacgccatattcataaattagaagacaatattgtttaatgaacaacactcttcagaatgacagattcaaccccaacgtttttcgaagtcctagctgacttcattgacaagttgatcttttttttttttgagacagtttccctcctgttgcccaggctggagtgcaatggcgcaatcgtggctcgccgcaacctctgcctcctgggttcaagcgactctcctgccacagcctcctgagtagttgggattacaggcatgcgccagcaagcccagctaatttttgtatttttagtagagacggggtttcttcatgttggtcaggctggtcttgaactcccaacctcaggtgatccgcccatctccacttcccaaaggcagcctgatcttaagattcatatgtaaattcagtgaacccagaagagccaa[186 bp omitted]tggtggcgggctcctgtagtcccagctacttgggaggc[132 bp omitted]ggcagtggcatgatctcagctcactgcaacctccacctcccaggttgaagtcattctcctgcctcagcctcccgagtagctgagattacaggtgcccaccaccatgcccagcaaatttttgtatttttagtagagatggggcttcaccatgttgtcctggctggtctagaactcctgacatcaagtgatctgtctgctgtggcctcccaaagtgctaggattataggcatgagccacggcacctggcctcggccaacaatcttaacaaagaagaataaagttgaaggattaactcttcttaattttaaaatttactacaaagctactgttatcaaaacagcgtggtactcacacaagacagacataaagatcaatggaatagaatcgaggtccagaaataaacctatacatattgtcaattggttttcaacaagggtggtcaatacaattcattgcaggaaagaatagcttcttcaacaaatggtgctgggccaaatagatacctatatgcaaaggagtgaagttgcactccttcacgataaaagacaaaaattaactcagaaggaatcaaatgcccaaatgtaaaagctaaaagtattaaactcttagaagaaaacataggcataatcttggattggttgatgttttcttagatatgacatcaaaactgtaagcaatgaagggaaaatagataaattggagtttgtcaaaatcaaaagctttggccgggtgtggtggctcacacctataatcccagcactttaggaggccaaggtgggtggatcacctgaggttgggagtttgagaccagattgaccaacatggagaaaccccatccctactaaaaatacaaaattagccgggtgtggtggcacatgcctgtaatcccagctactcgggaggctgaggcaggagaatagcttgaacctgggaggcagagactgcagtgagctgagatcatgccattgcactccagcctggccaacagagcgaaagtccatctcaaaaaataataataataaaataaaaataaaagctgtctttcttcaaagcacatcaagatagtgaagtgacaatctacagaatggcagaaaatatctgcaagtcatatatctgataagggacttgaatccgaaatacaaaaagaactcctacaactcaacaatgaaaagaaaaacaacccaatttaaacatgggcaaaggatttgaatagacatttatccagaaaagatatatatatatgaacaataagcacatgaagagatagtctacatcattggccatcaggcaaatgcaactcaaaaccataag[132 bp omitted]gaccagcctggccaacatggccaaaccacgtctgtactaaaaatacaaaaattagccaggcatggtgtcaggtgcctgtaattccagctactcaggaggctgaggaaggagaattgcttgaattcgggaggcagaagttgtgcagtgggccaaggttgtgccattgcactccagcctgggtgacaagagcaaaactccatcaaaaaaaaaaaaagtagacaataaataagtgttggcaaagatgtagagaatttggagccctcaaacattgctggtagaatcatcaaatggtgcagctactttgaaaaacagtttagcagttctccaaaatgctaaacatagagtcaccatatgacccagcaattctactcctggttatatagctgagcaaaatgaaaacatatgtccacataaaaattgcacacaaatgttcacagcagtgttatatgaaaataactcaaatgttcctcaaccgatgaatgaataacgaaatgtgggatagccacacaaaaaaacattatttggtcacaaagggaaacaaattactgataggtgctatgagacaatgaaccttgaaaacatgcttggtgaaagaagccagatgcaaatgccagcatattgtgtgattccattcatataaaatgtccagaataggaaaatccatctacatggaaaacagattagtagctcgttgccagtgtctgtcagaaaaggagactaggcagtgactttaattggtacagggtttctttggtgatgtttaaactgttctaaaattgtggtgatgattgcatatgtttgtgaatatactacttaagtgcgtgctttcaaggggtagattttaaaatttgagttatatctcaataaagccattattaaaaatttaggaaatacagaatatatagtcttatttcctcctctttctctctctctctctctttttttttttttttttttttgagatggagttttgctcttgtcacccaggctggagtgcaatggcgtgacctgggctcaccgcaacctccgcctcccgggttcaagcgattctcctgcctcagcctcctgagtagctggtattatagttgagcaccaccacgcctggctaatttttgtactttaactagagatggggtttcaccatgtctgccaggctggtcttgaactcctgatctcaggtgatccaccccctttggcttcccaaagtgttgggattacaggcatgagccaccgcgcctggcctttcccacttttcttaacaaaatgtggcatactctatatacatttttgaactatgattttttttttcacttaaaaatatatcatgatggccgggtgtgctggctcacacctgtaatcttagcactttgggcgcctgtagtcccagatacttaagaagttgaggcaggaagaattgcctgaacctgcaaggcggaggttgcagtgagccgagatggtgccactgcactccagcctgggcaacagagcgagactctgtctcaggaaaaaaaaaaaaaaaagagagaggcagaggcaggagaatcgcttgaacctgggaggtggaggttgcagtgagccgagattataccattgtactccagcctgggtgacaagagcaaaactctatctcaaaaaaaaaaagtatataatgacattcacttcataataatacatggaacttctgttcattctcgtttatgccacatagtactctactgtgtagctctaccatgtataattcaatgagtttcctgtgtacgtggcatatgggctgttcataacattttgctaaaatgtcacaattaataaccttgtgcacttgttctttcattttttacagatgtatcttcaaggtaacttcctataaaagagattattgtgtcaaaggatagatacatgtgaatgtatgattgttaaacattgccaaattttctctctctagtatttgttccagtttgtacttccaacagcaatgtaataagagttattattttccttccagcttcattaatatagtaggttgccaccttttgaatttttg[132 bp omitted]gaaaccccgtctctactaaaaatacaaaattagctgggcgtggtggcgcatgcctgtaatcccagctactcaggaggctgaggcaggagaattgcttgaacccgggaggtggaggttgcggtgacctgagatcgcaccattgcactccagcctgggcaacgagagcgacactccgtctcaaaaaacaaaaacaaaaagaaacagtatctcagtggagtttcagtttgaattctcttttgagtgaagttaagcatcttttgacatgtttaaagagcttttttttttttgagacagagtctcactcttgttgcccaggatggactggaatggctagatctcggctcactacaacctctgtctctcgggttcaagcgattctcctgcctcagcctcccaagtagctgggattacaggcacatcccaccatgcctggctaattttgtattttcagtagagacggggtttcaccatgttggccaggctagtctcgaaatcctgaccttgggtgatccgccagccttgacctcacaaagtcctggaatcactggtgtgagccaccatgcccggccttagtttttaaaacaaagaagaaatataagggagggtaacttttagagatacccatgaaaactacaaaaatcaattcatttgataatattacagcatggaagtttggggatattcatgaaactgcctttgcaaaattatgactgagacagtgaaagagatctaacttaaccgactccatcttgcctctaacctccaagctgtcattgttcattcctgggcgtaggctgcactaactttgggaaaaacttagtttatagtttaaaacaaagacaataacagctctttcccaaaacaaacctacttcttgcctggggactagattgtctttgtaggactaacattagccacaagattagaaattatggttttggagtcatgcagctgaaggatacaagattctgaccttccctaaactgctcctaagatcagtgcttgagatactgtgcagaccctgcacttgatagatcagctggcatcacccagatcaataaactggcttgtctcatcttgtggcccccacccaggaactgagtcagtgcatgaaaacagcttcgacctccctgtgatttcacccctgaccaatcagcaatcctgactcactggcctggcttccccccacccaccaagttatccttaaaaatactgctccccaaatgctcagggagacttatttgagtaataataaaactccagtctcccacacagctggctctgcataaattactctttattgcaatttccctatcttaatgaatcggctctgtctaggcagcgggcaaggtgaaggaaccccttgggcggttacattcgcggtatctgacacatatggctagccagcaccaacagcaaataagcatacactctgaagtcaggcagagatggatttaaattctggttcttcccgttgactgtgtgaattgggcaagtcatttaatctctctgagctctgggataataatggaacctacttcaaaggactgttaaaaggattgaggagataaaaaatctttattttattattattattaattattattttgagacagagtcttgctctgtcgcccaggctggagtgcagtggctggacctcggctcactgcaagctccgcctctcgggttcacgccattctcctgcctc[133 bp omitted]tcagcctcccaaagtgttgggattacaggcgtgagccaccgagcccgctccataaaaaatctttagtgaatagtaggtgctcagtaagtggtacgtattactaacagttaattttatggtctgcaggctgggcatggtggctcatgcctgtaatcctagcactttgggaggccaaggtagtggatcactcgaggtcaggagttcaagaccagcctggccaacatggtgaaaccctgtctctactaaaaacacaaaaaattagccagatgtggtggtgagctcctatagtcccagctacttgggaggctgaggcacaagaattgcttgaacctggaggtg[138 bp omitted]gggaggccgagatggttaggagttcaagaccagcgttggccaacgtggcaaaatcccatctctactaaaaatacaaaaattagctgggtgtggtggtgcgcacctgtaatctcagctacttgggaggctgaggcaggcgaacagcttcagtctgggagggggagtttgctgtgagccgagatcacgccactgtactccagcctggtcaacagcacaagactccatctcaaaaaaaaaaaaaaaaaaaagaaagaagaaataaaccactctgcctctatgaatagacgacaggttccctcaaccaatatctccatcatattgtttttaatggattacatgagtcaacacaagggtaaggcacttaggccactgcttagcacatggtctacactagtaaatatgagctatttttatttccagccaattatgccacggcgtggttgatgttacagaagaggaattctgtgagagtggtgcatccaccagctctgaagaaactatatctagcaaactacatttatcaagtaatactgggtcaggcatggtggcttacacctgtaatctcagcactttgggaggctaatgtgggcgaatcacttgagcaggagtttgagaccagcctgcccaacctggtgaaaccctctctctaccaaaaaaaaaaaaaaaaaaaaaaaattagccaggcatgggggtgcacctgtagtcccagctacttgggaggctgaggaaggagaatcacttgaacccaggagacagaggctgcagtgagctgagatcacacctctgcactccagcctggtgacagagttagactttgtctcaaaaaacaaaacaaaacaaaaagtaaaaatggatccctctttgtattattaatcaacaattaattccaattagaactggaataagaacaggccaggcgcggtggctcatgtctataatcccagcactttgggaggctgaggcaggcagatcacctgaggtcaggagtttgagaccagcctggccaacattgtgaaactccgtctccactaaaaaaagaaaaaaaaagtagccgggtgtggtggcgtgtgcctgtattcccagcgactcgggaggctgaggcaggagaatcgcttgaacccaggcagcggaggttgcagtgagccgagatcggaccactgcactccggcctgggtgacagagggagactccatctcaataaaaataaaataaaataaaataactggaataacaacttttaataagggctgggcacggtggctcatgcctgtaatcccaacactttgggaggtcaaggcaggcggatcacctgaggtcaggaattcaagaccagcctggccaacatggtgaaaccctgtctctgcaaaaatacaaaaattagccaggcataatggcaggtgcctgtaatcccagctactcaggaggctgagacaggtgaatcacttgaacccaggaggcagaggttgcagtaagctgagatcgtgccattgcactacagcctgggtgacagagactctgtctcaaaaaaaaaaaaaaaagaacttttaatcagcatgtgataagcaatatgatataatttctgtccaaagcaaagaaacttgacattttagccttgcaaccttatctagaataaatgtgacggttccgttaggcttttgcaaatattggtgatttctgccctggatccctagtgataccttcacagactgacttctatggtccaggacccttcttcccaggatggaaactacctatctaggaaaaaaggacagaaagaaagaaatgagtagaggggcacgctgatatttatagaccaactaccatgtgttagaggttaggtatttgatctctttagcctcctgatgtactgaaaggctgatttattattcccattttagagataaggaacttagataaacaagaactcagagaggttaaacaatgtgttttgggtcaaaaggtaatttgtaccagaatttcttttttttttttttgagacggagtctcactctattgcccagactggagtgcaatggtgcaatcttggctcactgcaacctccccctcccaggttcaagcaattcccctgcctcagcctcctgagtagctgggattacaggcatgtgccaccactcctggctaattttgtgtttttttgtttgtttgtttgtttgtttttgagatggagtctcgctctgttgcctaggctggagtgcagtggcgcgatctcggctcactgcaagctctgcctccgagattcacgccattctcctgcctcagtttcccgaatagctggtactacaggtgcccatcaccatgcctggctaattttgtttttgtatttttagtagagacagggtttcaccatattagccaggatggtcttgatctcctgacctcgtgatctgcccgcctcggcctcccaaagggctgggattacaggcatgagccaccgtgcctggctaattttgtgtttttagtagagacagggtttcaccatgttggccaggctggtctcgaactcctgacctcaggagatccacccacctgggcctcccaaagtgctgggattacaggtgcgagccaccatgtaccagaatttctaggtcttctgattcaaagcctggagctcttccctagatatcaatctacatcttgtgagactgtgatagagaagtcagccttaattagccgggcatggtggtgcatgcctgtagtcccaggtatttgggaggctgaggcaagagaattgcttgaatccaggaggtggaggttgcagtgagctgagattgcaccactgcactcgaccctgggcgacagagtgagaccctgtctcaaaaaaaaaaaaaaaaaaaaaagaactcagcctcagccttatgtttgcggtactctcccacataggccttacgtgggagagggatggaggggtggagcaaggatgcaatggagcaatgatcatgattctagttttccttctgtaggtcccaggaggggaaagtagttgctcatggccaaataaaccaggggatacttggagagcgagaaatcaggctggggaatcaccctggctaaagacaacaagggtgtctgtacctcatgagctcttcctgggaagctttagtgaggaagctagtactcagtttgtgactttccaagggtttccacttgcctggaaggtgacaagtgtctgggaagcagaagtccttgcttctggtccttcccctataacaggtactgaacctgtcccttattgaaggccagggacgtatggtgccctggccccactccctggtcccttcctgctcttgagaatctggattccagagggagaggaaaaccaacagtagtgagtactatcaacagtagtgagtactactatcaacagtagtgagtactatcagctgaaccctgaattgatacacctggtctgacagccatttgtatttattggaaaccacaggacagaatccttgaaacagaattcattgaggatattttgatttatctactctgtgcccactttttttaaaatttttattttttgacttggagtcttgctctgttgtccaggctggagtgcagtggcgagatcttggctcactgcaacctccatcttccaggttcaagcaattctcctgcctcagcctcccgagtagctgggattacaggtgcgtgccgccacacctggctaatttttgtatttttagtagagatgaggttttgccatgttggccagggcagtctggaactcctgaccacaagtgatctgcatgcctctacctcccaaagtgctgggattagaggcatgagccaccacacccggcctactctgtgcctattgcccaccttttgggttgtcagttggggaaataatatttatgggaaacatgtagtcaacattaaaatgcagcagtctgttctctagcatgtctgaccacttgctagccagatctgcttgtacacttgcagtgacaagctcactgcccgaagggcagttccttcttgctctggtcagctctgagggagagcaagttcttctttagttgaagaaatctagttgaagagctgaagactctcttgctgcaatccctgcccatctgtatgcactgtattccagggatttgaggacaatcttcatggcccaagtcatctaccctcctacccctagtgtaactttctttgatatttccatgtattttgcacagaaacttttggatagatacttcattccttgggtctccatccactgcagctggtcagtgtccctgcaaaaaatggtgcacagaaccaacattgctgatgtgacccaatcaggataatgtgcaggagatgcgtccgttcctataatctacactgtgtgactatattaatgaaacatagagtgaatgctttctatcagttccacagaacttgctctttttttttttttttcagacggagtctcgctctgttgccc[132 bp omitted]atttttagtagagacggtgcttcaccgtg[243 bp omitted]tctcctgcctcagcctctccagtagctgggactacaggcacccgccatgatgccctgtatgttaaaactttttaaaaatctagtccactgttgatgaacatatgagtcctttatttatcgtattatgaactatgccactgtgaatattcgtgtgtctcctggggcacatgggcaatgtcattggtaactaattatttcatgtgtttatgtcttattcccaatttccttcagaacataagaatcacatcttttatacttagtaaagactttgagcatacatttgttttcctaaaatatattcctaggggtggaactgctgggtcttaaggtttacctaaaaatacgaaaatgttcaatattcttgatgctcctatctgatttcaaaatggctttttaactacttccctcacatggagagccctaggtgtccaaatcatatgcctgaccatttctgagggaccttgacttgagggcctggcttcaagcctcattatcaatggcaacaaatttgccactctctcactggaaggagccccttctattttatttttatttatttcttttttttgagagggagtcttgctctgtcgcccaggctggagtgcagtggtgcaattttggctcactgcaacctctggacctcctgggttcaagcaattctgcctcagcctcccgattgtaagtgcccaacaccacgcctggctaatttttgtattttagtagagacagggt[146 bp omitted]cacaacaatacagaggatgcactgggctgccctatcctggccaaaggtcttcctggtaagcatggatttgctcatccaggaaaatcatttatggggggttgggcagggtgttggggagaccctgcttgctctctcaaatgcacaccagccatttgggagacattaactgctcaaaaaactcgagtctgtattttggctctcctctaacgatggcaggacctggggcaaaagtacaaatag[131 bp omitted]tgaaaccctgtctctactaaaattacaagagttaactgggcgtggtgacacacgcctataatcctagctactcaggaggctgaggcaggagaatcactggaatccgggaggtggaggttgcagtgagctgagatggtgccactgccctccagcctgggcaatagagtgagagactccgtctccaaaaattaaataaataataaaataaaataaaattacaaactactccaattaaccgctaaccttaatacagtctatccttctacttggacaaatctacctgtttaagacctggaagaccaggtttaaatttagaattcctgggctcctgggagttatgcccatgaatgaggtggcgaaagcagcacaggccctggcccaactattgtctcttggctcacttgccttcttttctcacctctgtcctgcaccatgagggatctgtggacataggagctcaaacacccaagtgtcgtgtcacccccttaaaataaaacaaagctgccctttagcctccctttttttcagtgagaaataatcattttaataaaagtataccttatttaaaacaaatgatttaaagaaagtagaaactgattctaattagtggattttctgattattattattattatttgagatggagtctcgatctgtcgcccaggctggcagtggtgcgatcttggctcactgcaacctccgccttctgggttcaagcaattctctgcctcagcctcccgagtagctgggagtacaggcgcctgccaccacacccgactaattttttgtatttttagtagagatggggtttcaccatc[134 bp omitted]atgtgctaaacgtgcaggtttgttacataggtatacatgtgccatggtggtttgctgcatctatcaacccgtcatctaggttttaagccccgcatgcattaggtatttgtcctaatgctctccctccccttccccccaccccccacaggccccggtgtgtgatgttcccctccctgtgtccatgtgttctcattattcaattcccacttatgagtgagaacatgaggtgtttggttttcttttcctgtgttagtttgctgagaatgatggtttccagcttcatgcatgtccctgcaaaggacatgaactcattctttatgctttcactttagcttcttttagggatgtctagactctgccatagagagaatggatctgggaaagagaccacagcttcagccatctggaaagggaattctggggccacaagtattcagaacttggtcctgaagtgccaaaccctgtggactccctcatcctggggtgggattgctgggtcttaaaatgtac[223 bp omitted]gaggcaggagaattgcttgaacccgggaggcagaggttgcagtgagccgagatcgcaccatggcactccagcctgggtgtcagagtgagactctatctccaaaaaaaaaaaaaaagctttttaaactacctccttggcatggggcactccaggtgtcgaaatcagacggggagtggtgattagaggggagttcctaaagtatagggcccaggggcccaagtataagggccacactttgtgtatatgatttctcctttcctgccatgagtgcagggtctgtacctggctgtatctccagcatctatcacgactgaaaacccaaacgtatttgctgaatggatagtatactggcctctgcaccagaagacctggggtccaggcccagtactgtcggaaacagttcttcatactttattacctcgtttaaacttttcttagccattatattgataaaaattccaagaggtgaagtgactctcccaaggtcgcaaagctagaagaggtagaggctggaactgcaccccgccatcggtcctcctctcttactcatttttttttttcccctcactgtgctggggtggagaaccgggaccggcaccttcgagaggccaggcctctgctgcagcccctcttctccagctccgctcggcactcagcctccccgcgccgctgggtcaggcgcccagctccgccgaaaccctcccctcccgccgcgctccctccgcgctccctccgcgctccctccgcgctccctccgcgctccctccgcgctccctccgcgctccctccgcgctccctccgcgctccctccgcgctcccgaggccccgcccctcccctcgggccaacgtcacgtgccgccccatccccctgcgcctgcgcactgcttatttcccgctgtcaggatgaggaggcggaggtcggcggtcgggtccgtctctgcccgcggctgtggcggcgccggcggatccagccttagcggtttctctctgggcggcggcggcggcggctcggttgacgcctcctccgccagctgagcccgcgggagcccaggacgccgcttccccgcccatccccgctccccgaggccggccgcctggtcatggcgcagccgggcccggcttcccagcctgacggtgaggcgcccaccatggcaggcgcggcgggcgcggcctgcccggcgtcggcgtcgcgggaggatttcggggcgggcaggcggcggcaagggcgcgcgcaggccccgggggtgaccccgccgggcggaggcgggggcgcgcgggctgcggcgcgcgagggcggcgcgggcgccccggctgccgtcgctggggagggggcgggaggcgcgggtgcagcgcttgcgggagggcagagggaagggcgtggggaggctgctgggtagcgtggggtagtgtggggagggagcggttctgggtagcgggggaccggcacgtgggttctgcccgtgggggaggatggaaatcgggaacatgtgctatattcgttaaagaaaaaaaatcttagcttaggtagtgtaccctccctgccgccccaatccttgctatagaactctttgcacccagttatgtgacctgaaagtagttgtgtacagtaactggatttagtagcattccctgaatggcagtgtggcttaatggttaagtgttggggcctgggagtctagaggacctgtattcttaaccagcaagctctgggctcatttcttagcctcgttgagcctcagtattctcacccacgaattaaccaagaggttaattcatgcctttatattttatctataaaaatagcaacacgaatgtgtatatacaataatagtattatggaggtattaggaataatgagaatagtgtttgagaatgctgaggcctacttgcactacttgaagatatttgcttgtggaactaaaaaaaaaaaagtgaagtcgaagaaatgtgtcatttatattcttggaaggaaaaaagggccccatcctaaataatcaaagttggttgtcagagcccttcgtgaccttctgggaaattggactaagctgtgcttcacagattgactacatggttccaggttttaccacctagaatagatgtttggaaatagtgtgcttgggcttttccaaggtcccactgtatctagttgtgaaagtactttctggtgtatttctataatcagcgtgtgtgcttagcatctttaagtgtgagtagagtagaatgttgggaaaaggggcttggtacggagtaggtactttaaaacttggctttccttggggttgtctcaaaataacctttcgtgaaacccttactttttatttttgcctttggggaacttgaaaccatgttatcagattttaaggttctggctgctctctgggaaatgtgcttcagagcctgttagcctgtagttttgggtgttgttgcttgcctaaggggagatgtccagtaagcatttagacttttataagaacctgctttgctgtttctgttccaggagaagggaagggaagcatttttggtgggctgtcagagagaggaaactgggatgtcttcaggctgcattttaatgatcaccttttgcatttggtgtcaggcaagaaaactttgttcttccacaatcccactttgttactgcacacagaggcaagatacagagagcttgtggttctgaacaggagtggtaggtatgcatagctggctgctgccttctcttgagttgcatggaaagaaacgtctagggcagctcaggtgacatgaccgtctggaatcaaaattccctgcctctttgaagatatgaaatggtcttccttgtaaataggcagaagtgactaagcacttgaacgaggctagggaaaactagctttaggaaatcttgtattcttggtattttagttcaggtttctttcctatttctcaaatcttgtgactctaggatgagatttagtttgcatagattgcaatttttattttaaattaatgtaggtagccatggctactttttacagtaggagagagataatttggtacgtttgagtgccttgtgtcagtgccttagaagttcatcttggggattttaatttttttttttttctttgagacagtatctcactctgttgcccaggctggagagcagtggcgcgatcttggctcactgcagcctcgacctcctggggtcaaagcaatcctgctacctcagcctcccaagtagctgtgactacaggtgcatgccactattcccagctaatttttgtatttttgtagatacggcgttttgccatgttgcctaggctggtcccaaactcctgaactcaagggatccacctgcctacacttcccaaagtgctaggattgtaggtgtgagcccgtgagtccggcttttggggatttaatttgtgtctttagctgaactcatgtagaccattttagctttaggcacgtttgaatttcctagtcctgctgattaaaaaaaaaaaaaatcgccagaattcttttgtgtcaaactggtggtgaaagataactaactgcttagtctttgactttatcttgttttatcctgtttcagaagcgattgtctttgatgactttttaaaaaaaaaaaaatattgtctgtttttcatggccatatggtagattaggaaaatcgatttgtgtgtaaatcgaagggatgaaatgtaatcattttattcattgtaattattttgtaagttaaaaaaagttttgggtttttgatactgcatcttagtttacttatttggaatacaggtaattttaatagttaaagaaatttcagttgatctgttttcccttgagaatttaaaaatgaaaattttctaattttagtatttcttttaatctaagttcaactatatctttgaagcatttgctctggttttacttcactttttttcttttttttttttttcttttgtagagagggtctcattgtgttgcccagtctggtcttgaacccctgggctcaagtgattctcccatcttggcctctcagtgttgggattacaggcatgagcaactgcacccagcctacttcattattttttattcttgccatgttggccaggctggattcctgattgtttcctgttagttacacagacatgctaccttttacccctgaaggacatgctttacatacataagtctgcaacttccctatctcacttaataaatgttagctatcatattatatactcatggttatatggccatgtaatgttctgcaaacactataggcattatcttaggaaatcttcatagcaatggtactattgaatattactgcttctattttcttgatgaggaaactgaagcacacagaagttaaagaaacgtgcctgtgttatacagctattaagtgggggagcaggattcaaatccatgccatctggcttatgtactagatcatggactacttccaggtcagtgttgtaggccttcttcattcttcttaaagacgatcttatcatatgcatgtaccaggcatgatttatggcctatttccctattgtggggcaagtagattgttttcaaattttaattattttataagcagtgttgtaatggatgtccttgtgcatattttttaaggtactcttttacttctgtaagactagtgaattaaataaagggcatgagttccgagtggtttaaattttaatacctgttgctagcttactctccaaggcatcaatttacatacttgccaacgatatatggcaggtggatttcccctgtaatcctacaagctctggatgatgtcatttgttttaaatttgtgtcttttgattaaaaaaagtgatattgtttggccgggcatggtggctcatgcctgtaatcccagcactttgggaggccaaggcagatggatcacaaggtcaggcgttcaagaccagcctggccaatatggtgaaaccccatctctactaaaaatacaaaagttagccgggtgtggtggtgcgcacctgtagtcccagctactcaggaggctgaggcagaagaaccgcttgaacccgggaggtggagtgagcagtgagccgagatcgtgccactgcactccagcctgggggacagagtgagactctgtctcaaaaaaaaaagagttgtattgttcaattaacaagtatttgtgtgcctattctatgccgaatcctatgctaggatctaggaaatacagtgatgaacaaaaccagacccagtccctttcccaggtagtgaatcattcagccattaattagataatcctatagacacacacaaaactatttattcatctaatatgaatgcatactgtttgtcaggcacaattctaggcatttggaatacatcagtaggcaatatagataataaataaccctgccctagtgtgggagaaacggatattaaacaacaaacgtaagcaaatgatacgggttgttagatgataagtgcaatggaaaaaagaaaacagagcaggagaaagggaagggggtggggctggttttaaataggctggtcaggcagctttattgagaagatgacatttgtgcaaagacttgaagtagatagaggagttagccttgaggatatctggtggaagggtgttctaggcagggatcagtttttgcatatgccttgagggcggaagcatgtctggcatgtttgagtaatggcatggaggtcagtctggctggaatgatgttacggggcctggggcaagagtgtagtaggatatgaggtcagagaggtaacgaggtggaggcagatcttcttgggccctagaagtattgcaaagattggttttcactatggggaaccattgaaaagctttgaacagaggaatgatgtgatctcacttatgttttaaaaaaatcactctgggccaaagtgctgggat[132 bp omitted]aacatggtgaaacccaatctctactaaaaatacaaaaattagtcagacatggtggcacgcgcctgtaatcccagctacttgggaggctgaggcaggagaattgcttgaacctgggaggtggaggttgcagtgggcgaagatcatgccaccgtgctccagcctgggcaacagagtgagactctgtcgcaaaaaaaaaaaaaaaaaaaaaaaaacccaaaacactgagcgggcgtggtgttgtctcatacctgtaatctcaacactttgggaggcctaggtgggtggattgcttgagcccaggagtttgagaccagcctgggcaatatggcaaaaccgcatctctacaaaaaattagccgggtgtgatggcctgtgcctctagtcccagctactcaggaggctgaggtgggaggatcacctaagcctgggaggtcgaggctgcagtgagctgtgatcttgctacttcactcccacctaggtgacagagtaagaccctgtctcaaaaaaaaaatcactctgactgctggattggcagtggagtaatagggaggtatgaatccagaaaaaagatgttgaagcttggaccaggatggaggttatattttgaaagtatggccaacaggatttgctgacggattgaatatgggatgcaaaagaaactgagtagtcaaggattactcaaaggtgtttggcctgagcaactagatgaacacaatgctatgaatgcctataactgacttatttgaccaatatacagaggtcagtaaaggcttttgatgaagtagtcctggagccgagatctgatggatgagcaggactcctggttttggaggatgcagaacgagtaacataactgaagaaaggtcactgtgcctgggtagaggagtaggtatgggctggcctgaggggtctttttccttagaggtgtacgggaacccactgaagggttttaagcaggtagatgatgtgtggctttttattttattttatttatttattttttgagatggaatctcgctcagtcgcccaggctagagtgcagtggcactatctcggctcactggaacctctacctcccaggttcaagtgattctcctgcctcagcctcccaagtagctgggattacaggcatgtgctgccatgctcggctaattttatatttttagtagagatgaggtttcgccat[137 bp omitted]tgctgtgttgcccaggctggagtgcagtggtgtgatctctgctcactgtaacctctgcctcccaggttcaggcgattctcgtgcctcagcccctcaagtagctgggattacaggcgtgcaccactacacctggctcatttttttgtatatttagtagagacagggtttcaccatgttggccgggctggtcttgatctcctgttctcaatttatccaccctccttggcctcccaaagtgctgggattataggagtgagccactgtgcctggttgaagtgtggctttttaatttgcacttccaggataggaattatattaattatggcctctttgtttattggctggctggcttgcttccttcctttcatccatttttttctttctttcatttttttctttttttgcttgccctcccttcctccctccctttcttcttcttcttcctcttccttttctcttctactatgagttgctgtttcacatctttcttttgtggcttgtctgtttatatctgtttcccatttttccattgggttgtccttttctcagtaatttggaggagctctttgtaaattatattagccctttggtatgtgttgcaaattttggtctcacagtttgtcatttacctcgttttaaaaattttttgttatgcagaaagctttaatttttatgtagatctgaccttttttttttttttttaaatttatggtttctgggtttcttattttgctgaggaagacctccccaactctcatgtttatttaaagagaaaaaaccttatcattttcaacacttgtggttttttatattttgtagtccaatccatttgcaatttatttatttttaaattagagaagtttaatataaagaattattaactaaactggagatcacccactaagacaaaagaaaaccctaaagaatacaagactagtagacataaggaacagtctcgcttccagggctgaggcagagcaccctttatttttttttctgaatagatagatagttgtcttaacgtttattcaatagttcatgtttttgtttgtaaattataacttggtaaatctcccaacctttgaactagcagagatacttaatctgaaaaacaaaagccctgcacttatccactgtctttgtcactctgatatcccaacacacagtagcctggaattaggtaatggcctttaattttcatgtcttacctggctttctgtggagagaattgcttttgaatcttaagggctctaatttctaaaatatctccatttatcatatgctaggtttttatccactgaagtttgatgttctcttcttatgtagtcattaatttgaatattgtctttatagaagtatttatttattttttgagatggagtctcgctctgtcgcccaggctagagtgcagtggcacgatctcagctcactgcaagctccgcctcctgggttcacgccattctcctgcctc[135 bp omitted]ggcctcccaaaatgctgggattacaggcgtgagccaccgcgcccgtcctccttgattattcttaagtatttattcattcagaaaaaatttggaatgagtacgttaagtgcacccactgtgcttccctctcttgtttaaaaaaaggacttaaaaaatatctgttgcgtttataagcttaagagagcatatatcattaacatctttacaattaagataaattaatgcattaagtgcatgttaatttaaataataatatttattattattttttgagatagagtctttctctgttgcccatgctaaaatgcagtgccgctatcttagctgactgcaaccttggcctcccgggttcaagtgatcctttcatctcagcctttggagtagctggaattactccgtgctcatgacccagcctgactaatttttttctagttttagtagagagtgggtttcaacatgttgcccaggctggtgctgaactcctggcctcaaatgatctgcccacctcggcctacaaagtgctgggattacaggtgtgtgccaccagacttggatgcattaattatattttttaatccttctgattctttaaaggtagtattaacactttcacaattgaggctatacaaattagtaacttgcctagaatccaggttgccgtgactattttcattctagctatccctcaggccagttttagcttagtaaactttgatcatttttaaaaaggcaaaattaaggctccaattttctgatcataaagtacaaagtgtaaaagaaaactagacttgctgagcgtggtggctcacacctgtaatcctagcactttgggaggctg[133 bp omitted]gaggcaggagaattgcttgagcctgggaggctaagaggttgtagtgagccaagatcgtgccattgcactccagcccgggcgacagtgcgagactccgtttaaaaaaaagaaaactagacttacacataattctgtcctttatttttttattctacattttaaattaatttttatatctacaaataaaaatattttaaaacaattgatcatattgcacatgtggttttgcattctgccattttcatttggttatgatgtgaacagtttccctgtgttgtaagtttttttgttttgttttgttttattagtggttttggccagttgcggtggctcacgcctgtaatctcagctctttgggagtctgaggtaggtggatcacttgggtcaggagtttgaggccagcctggccaacatggcgaaattccgtttctactaaaaatacaaaaattaggcctgatggtgtgcgcctgtaatcccagctactccagaggctgagacaggagagagtcatctgaacctgggaggtggagtttgcagtgatctgagattgagccactgcactccagcctgggggaaagagcgatactctgtctcaaaagtggtgataagtctgattcatcatataaatgtatcattttcctattactgccagtttgatcatttgtaaattctcgctattaataattacataggaaacaacattctcgtacattaatctttgatctcatctttatttcctagagtgttctggatctgaagtatgacattttggtatatattgccaaattgctttctagaaagccagttctagtttacatttcttcttcttagtgctgacgatgtctgttagtctcacttcatccttgtcaacgtgaagtatagacttaaagtgttcttgccaataggcaaggcctaaaaatggtatctgactgattttagttgcagttttagtatgattggcttttgttcatttttttcctttttttgtttttgattttttaaaaaatatatatattggccatttttttgtgtgcattgcctcatgatgtcctttacccctttcttattaaatttttagtttatttactttttttttgagatggagtttcgcttcgttaccaggctgtagtgcagtggcgcgatcttggctcactgctacctccacctcctgggttcaagcagttctgcctcggcctcccgagtagctgggattacaggtgtgtgccactgtgtctggctaactttgtatttttagtagagatagggtttcaccatgttgatcaggctggtctggaactcctgacctcatgtgatccacccaccttggcctcccaaagtgctgggattacaggtgtgaaccactgcacctggcctttatttatttgcttttgagacagggtcttgctctgtggctggagtctggtggcatggtgcgatcttgcccgattgcaatctctgctttccgggctcaggtgatcctctcacctcagcctctggagtagctgagactacaggcatgcaccaccatgcctcgctagtttttgtatttttagtagagataaggtttttccatgttgcccaggctggtcttgaacttctgggctcaagccatctgcctgccttggcatctcaaagtgctggcattacaggcatgagctgctgtgccttgttcattttcttattaatttataaatattggccaggtgtggtggctcatgcctataatctcagcagtttggaagactgaggcaggtggatcccttgaggtcaggagttcgagaccagcctgactaacatgaaaccccgtctctactaaacatacaaaaattagctgggtgtggtggtgcgtgcctgtaatcccagctacttgggagggtgaggcacgagaatcgcttgaatctgggaggtagaggttgcagtgagccgagattgcaccattgcactccagcctggacaataagagggaaactctgtctcccccctcaaaaaaaaaaatctgtatatctttctctctatatatatctctttgtatataatatcttcatagacattggcctttgttttttatttgttacagatatttacaggtattttccatgttttttcttattttggcttttggggtaatttatttttttgagacagggtctctctccatcacccaggctggagtgcagtggtgtgatcacggctcaatgtaaccttgacctctcacctcagcctcctgagggccctataggcacatgccaccatgcctaggtaatttttgtattttttgtacagacagaatctccctttgttgccctggctggtctcaaactcctgggctcaagggatccacctgcctcagtttcccaaagttctttgattacaggtgtgagccactgcatctggccattgggataatttttgttataaagaaatctaaaatttcacttggacaaacttattggtaatattttgacattttcaaagatgttctctgtcgcaaaatcaattagatagctgctcataacttatgttgttagtgtttaaatttatttttaaacagtggccaatttttttctacatcatttcaattattaagttgtttctatgtgagctgtttgtcaagttggatcttccacatcttgcacttgtcattaattttctttctataattattttataattacagataaaatttatattgcccattgcagacaactaagaaaatgcaaaaaaagtgtaaagtgaacagtcagcaaagacagtttattaacactttggtatacagttagccctctgtatctgcggggtccactttcatgaattcaaccatctggggattgaaaataaaccctttgggaggctgaggcgggggaatcatgaggtcaggagttcgagaccagtctgacaaaccctgtctactaaaaatacaaaagtcagctgggcgtggtgacacgcgtttgtaatcccagctactcaggaggctgaggcaggagaactgcttgaacccgggaggcggaggttgcagtgagctgaggtggcgccactgcactccagcctgggtgacagtgagactccaactcaagaaaataaaccaataaaacaataagaatacaaattaaaaaatgcagtatgacaactatttacatagtatttacattgtattaggtattataagttatttagaggtgatttaaagtacatgggagaatatgcataagttatatgcaaatactacactgttttatataagggacttgaatatcatcagattttggtatctgagaggtcctggaaccaatttccctcagatactgagggaaaacggtattgtcttttttttttttttttttttttttttttttttgagatggagtctcgctctgtcacccaggctggagtgcagtggcgcgatctcggctcactgcaagctctgcctcctgggtttgcgccattctcttgcctcagcctcccgagtagctgggactacaggcgcctgccaccacgccaggctaatttttgtatttttagtagagacagggtt[144 bp omitted]tttaaaaaaaaacgtaaaaatttgatagaaaattacagtacttttatagcatgttttttcccacttaaatgaagagatgttcatgatgtattattaaataatgttatttttgaggacagatgcggtggcttacacctgtaatcccagcactttgggagaccgagtcgggcaaatcacctgaagtcaggggttcgagaccagcctgaccaacatggtgaaaccccgtctctactaaaaaaaaataacaaaaattagccaggcgtggtggtgcacacctgtaatcccagctatttgagagaggcttaggcaggacaatcccttgaacccaggaggtggaggttgccatgagctgagatcatgccactgcactccagcctgggcaacagaggaagattccgtctcaaaaaaaaaaaaaaagttatttttaatggtatgtaacaatagtattctaatgtatggattccataataggtttaattaaccctcttagtaagtattgtttttatttttttctatttcaaaggacactgcggcaaacatcctgatacatgtgtctctaaatatttagccaaatacttccctctgctaaatccctgttctgtcaaagtttacatacatttaaaatttgatacttttgatacatttaagtttttatatgttcttttgtgtcattaggaataactgtctgagaccaactggaaagccaacccctagtagcttcaaaagtgaagggttcagtttttctgtgtgttacacgttcacaagtagagcattctaaatttggttcagctgctcaaggatgtcaaagatctgagtttcttcagttttctgctttcttcctctgtgggcctgtttgccacatcattattttttgtagatttagttctgatttctttttgggactatttattcctttaaatcttctactgttttcttagttacatttgttgggttctctacttcaggcacatggatcatccttatattggatagtctgtttctcatagctgtttcctctctaattcctttacttttctttaaaattcactgagattatctcaggtctttttgatgtgtttaacaaaacggattgcattaatggatttctggatgtttgtttttgcgcacttcagatgaactcaacttggttgtgatggattgttattgtagtatgtagctagatctgatttgctaaggttcgagaatttttgcgattatattcataagtgagattggcttgtagttttccattttggtactgcattgggttttggtatcttttttttgtttgtttaaggcagagtttcattcttgttgcccaggctggagtgcaatggtgctatctcagctcaccacaacctccgcctccaaagttcaagtgattctcctgcctcagcctcccaagtagctgggattacaagcatgtgccaccacacccggctaattttgtatttttagtagactgggtttctacatgttgatgaggccggtctcaaactcccaacctcaggtaatccacccgccttggcctcccaaagtgctgggattacaggtgtgagccaccgtgcccagcctggttttggtatcttgattatactagcttggtaaaacgggaaacatttcatttttttctatgttgaggacagtttaagtagtatagaaaatattctctgaacatttgatagaatttatgttctctttcaagattcatcttaacttgtatagctattgcataatttattttgtcaattttattttctttttgtttttggttggggtgggcaaggtctcactctgtagctccagctggagtgcagtggtacagtcatggctcacggtagccttgaccccgtggggtcagttgatcctcaaccttctgagcagctgggactacaggtgtgcaccaccacatctggctaattttttattttttgtagagaagaggtttcaccatgttgctcagactggtctcgaactcttggctcaaatgatctgcctgcctcagcttccatgagtgctgggattacaggcgtgagccactgtgcccagctttttgttagttttctattgttagatattgactttttccgaatgttttggaattttaactgatactgcagtcaatattcttgcaattatgtctttatacatatctatgattatttccttaggataaattcttggtggtgaaattgtataatgacctttagttgagaaccactggtttatgacaaaatgctttaggataccccctttaccattctgatataaaattgtacacaagacttttttaaaaaccccaaaacctaacagcataatgcctttattgtaaaggaaaataatttgtaattaatacagattgcttacagatttcaacgtataaatgaacagtgtgactgcataaaagaagaacatccctaggaggtggtattacaccgtttacaacttctgctcatgtgactcatgaatctcctctattaaacacctgtaatcatggggaaatccagctaggccttggaaccaggcaggtcagtgtttgaatccagctctgctacttactagctgtatatcaataggttagcttaatcttagaatgtttctgcatctgtaactggggtgataatgcctattttatggtttggtttgaaaatttaatgagccagtgtataaaataacttgcctgatactccatgaagagctatttgtgaattatttaatccttactacaaagctagaagatagtcctattattagtcccccttgttacagatggagagaaggaaccagcttagtgggagggctgggattcaaaccctagtttaattccagagcctgtgctctcagctgttatgctctatggcttctcatataatagttgataaataggcaatggatacttgattgttagctcaattacacatttcattttctgtagctttaatcaagagtttcctcccaagtgttaacatcagcgttctttccttaagacttctctttcctcttggttcttgtgttcccttcctgagacatacagttaatctccttcatccacatgtaggcagatagctatttattaaaaattctgttccctctctgtgtatgaccttgctatttcggaaaagcccataaataatgcagccaactttccttgtaaataaaatataaccctgtgtttttattatttatttagaagaacttttcttctgataagtaacccccactgtagagtttatagctaatgtgtagcctttttataacccaagtgtagggagataaggaattacatctacattttaaaattttctatgttacaatcaagggaagagtatatatagggaatttgattcgttttacggtataattaaatatggttctaagaggtgttttttgttgcattaggcttttttcttgtaaatgatagaaatcttaagactattctaaaccaattactgtttatattagaggaactggtaataaccagagattatgatattctttatgaatagttctccactctgaattgtgtgtgtatgtgcataatgcctcgttatatcttcatatggagcttcttaaacacttaaaaatattagtatgtagagtcaccaccttccatgtgtcatgattcttaatgtatggccagtct[134 bp omitted]tcctgcctcagccttctgagtagctgggactacaggcgtccgccac[138 bp omitted]cccggcctcctccaggattttaaactaggaatctgtgattttatttggaaatatttcagtgtatgtgtaaacgtaccacaatgctattataacacctaaaaccagttaacagtaacaccaaatatccattctgtgttcacatattccccagttgtcgtgcgcacttgtgtgtgtgtggagggggtgtggtgggaggaagtttcagcctaccacactgatacccaaactgtctcatttttggccagtgtgtggcctctttacattgactcctaaatctttttatataaccttaacagacaagatgttccaggcttatcttgtacacttcctgccctggacctggaattggtcctttttcctaaggatccctagttccttttagtggggaatgtcatttagagaacacagtctgggtactaggtgtgtagcaggttttttttttttttttaagcagttttacttaaatcactattatcactattatccttaaacagagaacactgggcatcatttaatcttttattgaggacttagtattatggaagttagttttggtactgagcggtaagctaatgagtccctagggccactgaagtgtgttttcagttagttttgtttgcccttatattacgtggttctgaattcatttttagtcacggttttatttttgccttgtgacccagtcctctctgctgtcattggggtttgtttctcatttacagggctattcaagctgctctctgcactcatttctttttctttttttcttttctttttctttttcttttttttttttttttggaggcagagtctctccttgtcgccaggctggagtgcaatggcgtgatctcggctcactgcaacctctgcctcctgggttcaagcgattctcctgcctcagcctcctgagtagctgggactacaggctcctgccaccatgcccggctaatttttgtatttttagtagagatggggtttcaccatgtgtgccaggatgctcttgatctcttgacctcatgatctgcccacctcggcctcccaaagtgctgtgattacaggcatcagccaccgtgcctggcctacactcatttctaaactgctttttctctctgattggactccaggcaaaactgagggttatattaggagatatgactgggtcttatagagtataatatgcagttagatgggaaggaaaatctacccagctaagcattcaagtgcatgagtttttcatttctgttaagcttgaaggctgttacattacattttgttgccaggcctccttaggcttctctagactgtgaaagtttctgtgactttggtttgatgatcttgccagttttaagaagtactggtcaggtattttgcagaatgtccctaaattgggatctgtgtgatgtttttctcatgattagactgacatagcgtcttgggaggaagagcacatgggtaaagtatcgttttctttgtgtcacatcaaggttacatacatggcttatcagtgatgtgtagccttgaccacccctactgaggtagtattggtcaagtttctctctctttcttggggtgcaagcggggggacctttctatactgtactcttgagaaggaagtcagtatgtgctcccccatccccgtatgatgttatgaaatcagccaggttgatcgtaagcagatttttcaagtgtttcctaccctctaactcttgttaattccttgtagatgtttgttattattgtttaatcattgcttagcaccctatgagcagtctttaagagtatggtagtgggagtgacagtatgttttgcccaagcttcttggttgcaaacaaaacaatttgtcctgtctggtctaagcagaaaaggtatttttgagaagatatgaagttgcttacagagtcattgggagggcaagggagagagattctagatgattctcaaactttagcctgcatctaaaagggcttgttaagcatgttaccgggccccatctccagaatttctgattccgggaagcctgggatggggcctgagaacttctcacaagtttccaggtgatggtgatgttgtggtcccagagctacacttggagaatcactcctttatgctaaactttaaggaatacccaaaagctgctctagaactgaccttacaggaaacttgcctctggtgctgctggcctatagaaattcactttaatgctgttgtctctgctgcttggactgataccatttctgattcaggagctagacctataccactgggacacgactaaaagtcttacagcaatgagaatggaacctcgtttctttacactgctctattctgaattgaagttgcatttgagtgtgtttgattggaggaggctgggtcacatgcctgcattctggttttaagggagattggggatttgtatttgacttctattttgggaagctgaaactcataaaatggaaatttctttaaatgtaagaagactatgcaaaggattgatagacagccatggatatggcagttgtcaactatagcagtactactgaaagtaacctgtccacaaactgtttttaatggtcttctagggcacaaggaacctgaaccagaatataaatccatgtactgctttcttcattgaaaaatgtcagtagaactaagcaatgtgcttagtgtcttagtttattttacgttgtggcacaaactccttatctcattcttagaccagtaacagtctgcataccaaacttagagtaataaatcaatatcaacctccaccaagatttcaggtgatataccaagggtctcttaggcctaaccaataactttgtttaaaaaaaaaaaaaatcaaccacctgcgccatggttaaaactgcactagcttcaggttgtaagaggagccttggtttaatagcagttcaagtgggaagggtttaaggacagtgttggattacattaatcttatgggataacaataacagtatggggttgtggcaaaaaagctagagtagatttaccatacattgttaagggtatggtcctctgaagaaaggagatatttctattagactctatgctggttttgtgtttagatcagactgtcatattttatgtggaactttgactaagtttagtttgaagggtgagcaacttggataatgaagcatttagaaatcatgattaggagaaatctggagaagaaaacggtgggtgtgaaatttcagatactagaaaatctgctctcattctggagagcagaaccaaaatctctaagggagcagatttaggggaatgttactgaaaacattttttttttttttgagatggagtcttgctctgttgcccaggctggagggcagttgtgcgatctcagctcactgcagccttgtcctccccagttcaagcaattctcaagcctcagcctcccgagtagctgggactacaggcgtccgccaccatgcccaactaatttttgtttttttggtatagatagggttttgccatattagccaggctggtctcgaactcctgacctcaggcgatccatccccctcggcctcccaagatgctgggattacagtcatgagccaccacacccggccagcttaccttagtctataaagttaccttataagctttttaattttttagactttttttttttttttttttggagtgtagtggtgccatcttggcttactgcagcctcaacctcccaggcgcaagcgacaggcacacacaaccacacctggctaatttttgtatttttagtagagatgggatctcactctgttgcccaggctggtctcaaactcctggcctcaagcagtcctcccaccttggcctcccaaagtaatgggattatagatgtgagccactgggcctggctaggaaaatcttaagtgtagtttaaaaaatgattttatagactgtgagtttcttaagagcaaaatttaaaaaatgattttttttgtgttgaaatattttaagaccattaaattatgaatacttttttatgagcaaatagattgaggtagagcaataaaataattcttaaaacaagaaagataaagcatctcattgccttttgatttaaatctcatcagcataattcttttactactctgaatgccattttggatattcattacagtctttttttctatataatttttgtgtagctcatactgtgctatgtataatgtatttacttaatataactttttctggcttggtattacttcactgaatgaatatgtaggatgggtaggatatacctaccatacttaatagttttattttattttattttattttttttgagataggatctcattctgtcacccaggctggaatgcagtggtgcgatcttggctcactgcaacctctgcctcccaggttcgagcaagtcttgtgcctcagtcccccaagtagctgagatgacaggcacgcactatcacgtccgtctaatttttgtatttttggtagagacagggtttcgccacattgaccaggttggtcttgaactcctgtcctgaagagatccacttgccttggccactgaaagtgctaggattacaggcatgagccactgtgcctgtccaatagttttattttaaaatccagtgagaaacaagataagacatatgagttttaggaactgttcagattctttgatcccactggagttattttttgttgtaaattgattgaaataggtgttttcttggattttgaacatcattaaacaaaaaggttttggtcgtagtaaatttcacattgcttatgtctttatcaaatttagtgtaaagatgccaggtgtggtggctcacacctataatcccagcactttgggaggccaaggcgggcagatcacttgaggtcaggagtttgagaccagcctggccaacatggtgaaaccccatctctactaaaagtacaaaaattagctgtgagtggtggtgggcacctgtaatctcagcgacttgggaggctgaggcaggagaatcacttgaaccccaggaggcagaggttgctgtgagccgagattgcaccattgcactctagcctgggcgacaagagcgaaattccatctcaaaaaaaaaaaataaataaaaatttattatattgttttacttgtaagaggaacgtagtagtaggacacagcttgagtcttagaaatattttaagttattgcgtgttctcttgtttatatcaaaattattattaggtctttactccatttatttattgtattcttttttcgttttgtattgctgttgctatttgagacattctgaattgagtgacatagtcatttttccctttggatgtcaagcattataagtagccattgcatggctggatgtggtggctcacaccggtaatcctagcactttggacggctgaggcgggtgagtcatctgagatcaggagttcgagactagcctggctaatgtggtaaagccctgtctctactaaaaatacaaaaaaattagccgggtatggtggtaggctcctgtaatcccagctacttgggaggctgaggcaggaggatcgcttgaacccaggagatggaggttgcagtgagccaagattgcgccactgcactccagcctgggcaacaaagcaacaactctgtctcaaggaaaaaaaaaaaaagtaggcaatggattagataatttctccctttttcttattgctcaaatgaaggcaacaaatacgggatgtgtggaactgttgacaaaggctggcatactgatattctcagccttctaaatttcagaaggtttaattttgttgaaggctggcattacagtaattagtattagtttgttcatgatgctataaagatacatggtaatagggaaggatatgagctggaagtctcagcatggaactgagtcagaatcttgaggttggaagtgacttctggtcttttctggctacatacaaagtcatttgatcactactttttttctttattcattaaataaatactaccaatttaataatgacagctaacacttatcaagtttgttctatatgccacactaagtactttttacatgaactattagctaatgatagtgacctattagttaccatgttataaaaaataatacagcattttgtgtgatgagagctattttctccttgatttgtggttggttgctaatgcattaggatatgcttatttgtaaactttctcatattgagagtgaatcgatttgtctcgatgttgtagtaaaggcattcttgtaaaaagcagttttttttgtctttctatattgtagaattgcagtatgttagaagtacttgaggtggatgatcacttcttaaaaataaaataagacaattactcgatatactctcaaaagatcatgatttctagaactgaacactgtcctgaagcctggagagagccaggctttgtgggtatagagtgggtctaaactgtgggtcagagccatgaaggggttgggagtaatggaaacatacttaatcttggctgcatctttaacagctgcatttttgttttgttgattcatttgcctcatttcctaattataaatatattaatgttgaggggtatgggtgtttcggttatgtgtgcattttggtagaaggtagggataggaggggatacatcttattagagaaaaataagaacagagggattttggtttttctctttccttgattccccagagccctttgttacctctgtactaatcagtagctaccagtaatactaaagtgttaagtggaaaagttgtttaacttattaaacaatgtggatttaacaataaaaataccagcagaattagcacagagaacagatttctttcatgatttcaaagggtaatatgagataattgcacattttccttccagtggatttctcatccctctttttctcaaagttatcaaaccttcagttgaccagaagtcagtgctttgacttagagaccctacatgttagttcctcaaaaattaccattagtgacatggaactcaaaccagcagtcatcctctttcggcaatgattgcacttacactattaaatctatagtgaggctagtttcaaggtctcatgggaatgaacacatagcgatgcttctcgacttaccatggggctatatcccattataaattggaaataacataaaatgcatttaatatacctaagttacggaacatcatagcttagcctagctaccttaaatgtacccagaatgcttatattagcctgcagctgggcaaaatcttctaacagaaagcctattgttgacaaaggctggcatacttacattctcagccttgtaaatttcagaaggtttaatattgttgaaggctggcattatggtaattagtttgttcacgatgctataaagatacatggtaggccgggcacggtggctcatgcctgtgatcgcagcactttgggaggccgaggtgggtggatcacctgaggtcaggaggtcaagaccagcctgggcaacatggtgaaaccctgtctctactaaaaatacaaatattagctgggcgtggtggcatgtgcctgtactcccagctactcgggaggctgaggcagaagaattgcttgagtccgggaggcggaggttgcaatgagccaagattgcaccactgcactccagcctgggtgacagagtgagactctgtctgaaaaaaaaaaaagatacatgataatagaggagggtataagctggaagtctaagcatggaactgagtcagaatcatgaggttggaagtgacttctggtcttttctggctatatacaaggtcatttgattgctacttttttttgttactcattaaataaataccaccaatttaataatgacagctaacagctaacatttatcaagttatagtaaaatgttgtatatctcatgtaatttattgaatcctctagtgaaagttgaaagtaaaaaagagaatggttgtatgagtaccataataaagtggaaaaattgtaagtgaaaccatcagtttgaaccatctgtgttggttttagttcattgtcaaaggaatacatatctgc[212 bp omitted]gaggcaggagaattgcttgaacctgggaggcagaatttgcggtgagccgagatcgccccactgcactgtagcctgggcaacagagggagactccgtctcaaaagcatatggaagaaattaatgagccataattctgttactcatagataaatcattggtacattttttccagtctttttttctatacattttaaaatcagctctcaattaaattgagtgattgggagaggggatagccttcaaagataatctcagatcttgattaaaattctaggcaaatcatcattatctggagtgacttgcagtaggaaacttggccctctgctggcctaagtagttagtggttgattagtactaaccgatatcccctaaagggattatggtcatagctttaaggctgggatgctgttggggcaaaaggggagatcaggggtttgcacagctggacctcctatcttatgcttcaatcaaaggaacccctgggtttggtcagggaaggcaatcatttaaccagctgtgtccaaattatagagtccataaagtaaaaagtctgctaatctccgcacaccatgatcaatgttgaaaacatggaagaaaaccagattatctcccagtaattgagagtttatatagaatgtgcagttctgtatcctctctatgaatgggtttttgattatgatctcagtataatggtaatggatcattttgaagttggaagaatagttcagtctggtatggctacactagttagggaacctattagattttgcttgtgacacttgagagaaatgggaaatagcaagattggcagtaggttcatttgtgggataagtagttcaaataatccaatatttaacagttctaaaattaaattgctattcagttgcacaaaggcactttagaagctcttttttttgtggggaagttggccttatgtgattctctgtatatttgtggtttcactttacatgactcatttacagttgtgtattaagtctaatacaaggatctttttttttttttttgagacagagtctcactctgtcacccaggctagagtgcagtggtgcgatctcggcccactgcaacctccgcctcccgggttcaagcgattctcctgcctcagcctcctgagtagctgggattacaggcacctgccactacacctggctaatttttgtatttttaatagagatgggat[146 bp omitted]gtggatttttggaagaagcttgactacttgtttcacgtatagcaatgtacagctagaatactaatttactgttttataaatttatgaataaaagttattacttgttaactagtgtttttttcccccagtttctcttcagcaacgggtagcagaattggaaaaaattaatgcagaatttttacgtgcacaacagcagcttgaacaagaatttaatcaaaagagagcaaaatttaaggagttatatttggctaaagagggtaagttcataagtctcgcaccaacttcaatgcgaaaactgccttaaagtgttgagtttcttggtagtagtgttaattttatcattgaataaaccttgattttatttgtacttgcataataaaagaatactgtttaaaggctaggttaagaatgggattgaaaaacaagttgaaaaatgccttcttcagattttgccttgttttttgatcttactgttcatatttaggttgcatagccttgagataagagaatgttattgctcttaacatttgggatacagttgtgggcaaactaggattgttggcattctaataacagctttagctatgttatctttaattccatgaaacatcagttttacccaacaaatattcagttatttatcaataaatatttatttaatatctactatgaggcagacattatacttgtgttgggtatacagaaagaggaaaattcatgtggttctttaacttggttgaactcaatgagcaaaacagatgttaagtaattgtgtgatgagtcgttaaaacaggaaattgcaggctgggcgcggtggctcacacctgtaatcccagcactttgggaggccaacgggcgggggcggatcacctgaggtcgggagttcaagtccagcctggccaacatggagaaaccctgtctgtactaaaaatacaaaattagctgggcatggtggcgcatgcctgtaatcccagctgctcgggaggctgaggcagaagaattgcttgaacccaggaggcagacgttgaggtgagctgagattgcgccattgcactccagcgtgggcgacaagagtgaaactcccatctcaaaaaaaaaaaaaaaagaaaaagaaactgtataaggaaaatacatgagagaacatgttgggggacctgatttgaaggatcagggaaggggcttaccttctgagtatcgacctagaataatgtgaatgtagtttccacagctctctagaccagtgattctcaaagtgtgattgtggaacagcatcattatcgtcatcatcacctgggaaagttgttagaaatgcaaatgtttgggtcccacccagatttactgagttagaaactgtgggatttgggtccagctgcacactaaattttgaaaactgctctagtctataatagaatagtggctctcaaattcaaatgtggataaaaatcacctggagagcttgttaaaccacagtatgtttgggtggagcccagaaatttgcatttctaataagctcatagatgattccagttactgctagttcaagtactacagtttgaaaaatcctgttctggactagtgatcatgcaccttttttaacttatgaactctgtaaaatatatacttacatacaaccttcatacatgttaaagttgatgtttaaaattttttgcttgaaaagatgtgaaggataaaattttatattgttgatatttacaatttaaatgaaagcttcgtccttttttttttttttttttgagatgggagtctcccccgacatcttcccctgtcacgcaggctggagttcagtggcactatctcagctcactacaacctccgcctcccatattcaagtgattctcctgccctgcccc[134 bp omitted]gcctcccaaagtgctgggtgagccaccacgcctggccaacttcctgcttttaaacatatccagtggaatgaaaatatcagtgatttatccattgttatctgtttaacaaacacatgaatagctttatagccgaaattttacagtggttttcctccttgcgttgggttttcttctttacatctcctttagaatttttttcttaaaaatggttttgaaacttgagtgtgcatttgtttcattcatttttttttttttttgagaccgagtctcgctgtgttgtccaggctgaagtgcagtggtgtgatcttggctcactgcaacctccgcctcctgggttcaagcgactcttgtgccttagcctccctagtagctggggctacaggtgtgtgccaccacgccctgctaatttttgtatttctagtagagacggggtctcaccatgttggccaggctggtctcgaactcctgacctcagatgatccgcctgcctcggcctcccagagtgctgggattacaggcgtgagccaccacaatgggcttgcgtgtgcatttgaattacctaatagggttcgttaaaacaaggattactggcttcccccctcagagacgctgactcactagggcactgggatccagagtttgtgtttttagcaagttaccagttggcggagatgttactgttcagagaccatactttaaaaactactggcctaaagtaacatcttgtgcttggaactcttaaaatatgcatataaatgttttctttacggagatattattaaaatttattataaatacacagttgatcacattatggatattttacatattactatgaaaataaggccaggcacggtggctgacacctgtaatcccagcattttgggaggccgaggcaggcggatcacaaggtcatgagttcgagaccagctgggccaacatggtgaaactctgtctctacaaaaaaaatacaaaaattagaaggcatgttggcatgggtctgtaatcccagctactcagaaggctgaggcaggagaatcgcttgaacctgggaggcggaggttgcagcaagctgagattgtgccactgcactccatccagcctgggtgacagagcgacttcatctcaaaaaaaaaaaaaaaaaaaaaaacagactaaaaaataggaaaatataaaaatcattggaaatgcagctcttttgagatatattggttctcattaaatcgttaatctctggatgcatattatttactgctagaaaaagatagcttgtcagcatcaattctattgtagttttatttttttaaacatataaatgccaagaacccttggtctcatgagtgagtaaatagaaacagagttttattacagcaattattattcaattctcttagctgtttctaaattatatgttaaattacatagttctttagcatcaaaatgtttttatcctatcagctaacaactgaattaggtctgtcttcaattttgttgaaagaggacttgcgtccacctgacttgccaaaagatttgttacactgttattagtcattcactttttaattattgacactaattttagttatccctctgtgaggcagagtctcactttttcgctcaggctggagtgcagtggcacaacaatcttggctcactgcaacctctgccccacggttcaagtgattctcctgccttagcctcccgagtagcagggattacaggtgtgtgccaccacacctggctaatttttttgtatttttagtagagacagggtttcaccctgttggccaggctgatcttgaactcctaacctcaaatgatctgcccgcctcagcctcccaaactgctgggattacaggcatgagccaccgtgcctggcctcatagaggagtttttaatacaacaggacaatgaaccatagtaaaatactatatgatggaaggttcttaggccttgtagaatttagccctggcttggaaaggattactgactgtggtatggaatggagttccattttttcatggctttcaggagggctgttttttattttcttttataggctggtaagtaggtgggaaagctgatgttcatgtctagtcatggtggcactctgcaagacactgtggaggttgggatgaatgagatatatggtttctattcccaagaaagaatagtctactgtggtagataatacattttgcacagtatcatcatttcaagatgtattgtgtgtcacaagaaatagtcctgtctggactaggcacggtcgcacatgcctgtaatcctagcagtttgagaggctgaggcgggtggatcacctgaggtcaggagttagagtccggcctggccaacatggtgaaaccctgtctgtattaaaaatacaaaaattagctgggcctggtgatggtgtgtgcctgtagtcccagctacttggggagctcagttaggagaattgcttgaacccaggaggcagaagttgcagtgagccaagatcgcgccactgcactccagcctggtcgacagagcgagactctgtctcaagagaaataagttctatctggttattcagtatctttacatgaatttatcgtctcccttttaaaatttgttcatgtttttgaattaatcaagcaccactgtcaactctgaaatgctatattcttgtcaagatgacctgtaatacatttgatgtatatataaaaggttgtggtagtattttctctggtgataagttgaaacccagcagtatgatgctggctaatgatatccattttctcctttacctcttataccaaaacctctgtagcttgttcatcctgtctacagctaattgaagtcagtcttgtctaaaccttgtttgttttgctttctttttctctgtccccaataaaactgttagggttcctttgttttcttattttctttgaaattataaaatagaattttcccaaaaactctgaagaaatgaaaatgactaagaacctcccatttctgaaatgcattatcaactgcagttttagatctgtgaattaaagagcttgtaacatgggttggttcagaaaacatgcttggtttgttaagattgcattgatgcatctaaacccggtaaatgggctttttgtgtactgttgtatctttactgtccagagcgctcagtaaactcagttggccacagcgaacagttggggtagctttttacaaaatttcaaaaaaaatactgtgatcctttttgagtttttggtggcgttcctaaagaaaatgcatagtatataaaaggtcaatgctgattattagtttttgtcttggccgttagcctatatcataataaaaatcaaatgtgaagatttcccctgagacagcagcttttattgtatctactgtgaagtctaaatctagtctttaatgattgccacaggtgtttacagtataaaccaggattttgatgtggacagcagtctttgttttatctttcaggaaaaccaggtcaaggtaaccctgaaagtccaaacattggtttttccccaataggtccagcttttgctttagtgttgtcatagctgtgtttgcacttgtttggagaatagctgaaatataagtgcaaatggtaatgagaaatgcacctttttacttctcttactgcctgttcttttcttagtacctattcttttttttttttttttttttttttttgagatggagttttgctctgttgcccaggctggagtgcagtggcacgatcttggctcactgcagcctccgcctcccaggttcaagtgattctcctgccttagcctcctaagtagctgggactacaggcgggtgccaccacgcccagctagtttttgtatttttagtagagttgggctttcaccacgttttccaggctggtcttagtaccccttcttttccaagccgacttcaactgggaatgttataaatatttctgaaagttttttttttttttttgagatggagtcttgctctgtcacccaggctggagtgcagtggcacgatctcggctcactgcaagctccgcctcctggcttcacgccattctcctccctc[134 bp omitted]agcttcccaaagtgctgggattacaggtgtgagccaccatgcccggctatatttctgaaagttttattgcttttctgttgaagtattttctgattcagcttttcctaaactaacttcagagcttggcattacagcagtgtttatgttttgtgctttggaaatttgtagtgttggcaatgagtaagagacggttacgtgaaacacagaacaaaaggccatatagttttcaatttgacgaaaaatagtaggaatagagcttatagctaatcaccagaggacactgaaattttctactggtgttcagaaggtctttatacatggttgtaatttatataaagctgttacgctaactaatcagaatttcaatagtgaaaagctagatttaggaagctatctgtggttccagtgccataaacttgcacttagatagggaaatgaaaacagagtatataaaattaacaaaacccattagtaatactgtaaacaaacgattagaaattaaaatagtgtttgctaatagatttaaccagtagagacgatacagaggttttagtaaattagaaaccagtactgagttcttcctcctagtgagacaaagagggaaatatgaaagaatataaagacaaagaggatgaattaagagccttcaacacacatctgaaaagagttccagggcaagagaatggaaggaatagtaaagaatatttgaagagataataacttagatttttactaataaaaaatgtgagtccttaacataaatactgagtaccaaacaggaaaaataatagtaaattcaggccgggcatggtggctcacgcctgtaatcccaacattttgggaggctgaggcgggtggatcacttgaggtcaggagtttgagaccagcctggtcaacatgatgaaaccccatctctactaaaaatacaaaaaactagccgagcatggtggtgcacatctgtaatccctgctacttgggaggctgaggcaggagaattgcttgaacctaggaggcggaggttgcagtgagctgaaattgcagcactgcactccagcctgggccacagagtgagactccatctcaaaaaacaaaacaaaacaaaaagtagtaaattcataccttgacacatcttttgtaagatagaacatcaagaatcaaaagaaaatgtgaaaagctaccagagaaaagaaacaattacaatgacaggagatacttcataaacaccatagatgccagaagacaatgaaataagatctccaaagtgcagagaaaaaataattgtcaacctaaaattttatatgctgctaaattatgtaagagtgagggcaaaatagatattttaggcatataaaaactaagcacttagccatctacataatcactaaaagtactgctagtaggccggctgcagtggctcatgcctgtaatcctatcactttgggaggccgaggcaggcggattgcctgagttcaggagtttgagaacagcctgggaaacatggtgaaaccgtgtgtctactaaaatacaaaaaattagctgggcatggcagtgtgggccgtagtcccagctactcaggaggctgaggcaggagaatggcttgaacccgggaggtggagg[138 bp omitted]atatataggatgtaagaaataggataggctgggcacggtgactcatgcctataatcccagcactttgggaggccaaggtgggcggattgcatgaggtcaggagttcaagatcagcctggccatcgtggtgaaaccccgtatctactagaaatgcaaaaattagctgggcgtggtggcaggcgcttgtaatcccacctactcgggaggctgaggtaggagaattgcctgaacccaagagacagagtt[136 bp omitted]ttaatgtttatcttttgagatgaagtcttgctctgtcacccaggctggcgtgctgtggcactatgtcggctgactgcaacctctgcttcccaggttcagtcgattctcctgccctagcctcctgagttgctggaattacgggcacctgctaccatgcctggctaatttttggaggagacacatccccacttattctttgaggctagtgttatcctgacctcaaaaccaaggaagacatcacaagaaacttagcccagtattacttgggaatatagatgcaaaaattctcacaaaagaactagcaaatcaaattaagctacaggtaaaaagaatcacacagcatgaaaagtgggattcatctcaggaatgcaaggttggtgcaacacctgaaaatcagtaggataaaaaacagagacacatgatcatcttactagacacagaaaaagtatttgacaaaacctaacactgttacatgataaaaacactaaaataggaatagaagggaactttgtcaacctgaaaatgggcttctacaaaaaacttacagctaacatcacacttaatgtttaaagaccaaatgcctttcccctaaaatcagaaacaggacaattatgtacactctgaccacttctgttcaacatctagaagtgaggatctatgtagggcacttacccaaagaaagaaagaaaaaggaaaggaaaggaatccatactggaaaggatatatatatatatatatatatgtagttttctgtttgctggcatataacttttaaaagccttaacaattttaaagtgataggtgtctttgttaatgagctgactgatggctggcagcccctaggtaatttcaggataggggatggtcaccagaaagaccaacacaggattagaggttggaacttccaaccctacctcccaacctccagggagaggagaggagctaaaggttaagttgatcattagtggccatttaatcatgtccatgtaataaagcctctaataactaaaaaggatagggtttggagagcttccagataactgaagatgtgaaggttcgtggtgggtggtgccccagagagggcgtagaagctccatgctccttcccacgtgccttgtcctgtgcacctttttctctatatcctttgtaatagtctttataataaactggtaaatgcaaataaatgtttccctgagttctgtgagcccattaacaaattaatcaaacctaaggagatggttgtaggaacctcgatttatagctggtcagtgagaaacacaggtaaaataattttgaagcttacaattgatatcagaagtggacttcagtcttcttagactgaattttcagcttgtatgatctgagttatttccaggtagatagtgtcagaattaaattagaggacacccaatgggagtatgctatcaaaattactgattggttactggtgggcgaaaagtagtatgtgaattatatctcaatgaagttgttacaaaaaagtacagtaagccaatgtaagtaaaaaaagattactaacgagaaattactggtatcagaaatgaaagaggagactgtactctaggtcccatatatagtaaaaggataatataagaaaattatggaacaacttcatgattaataaccttccaaaaaagaaagcactatgcccagttgtgtttactggtgagttctatctgccatttaaggaagaaactataccatgagttatacgaatctctctgagtctctattctctataatctttcagaagatagaaacagagggaatacttcctaactcattctatgaggtctgcataatcctaatctcaaaaccatacaaagacatttaatgaaaactacagacttacatctgtcatgcacatagatgcaagattccttgacagtatcttagcaaatccaatccaacaatgtataaaagttatacactgcagccacgtggcatttgtgtaggtacgcaagactggttcaacattcaaaaatcaatgtgtaacttaccatatttgaggtgatggatatgttaattgcactgatttgatcatttcacaatgtatagatgtatcagaataccactttgtacccaatacatatat[132 bp omitted]aaaccccgtctctgctaaaatacaaaaaattaaccgggtgtggtggtgcacacctgtaatcccagctactagggaggctgaggcaggggaattgctcgagcccagaggcagagattgcagtgagctgagatcatgccactgcactccagcctggtgacagaatgagactctgtctcaaaaaaaaaaaaaacaaaaaaacaaaaaaaaaaaacatatatatttttttcctttttgaggtggagtctcacttcatcacccaggctggagtgcagtgccgcaatctcggctcactgcaacctctgcctcccaggttcaagtgattttcctgcctcagtctcccaagtagctaggattacaggcgcccgccaccacacctggctgatttttgtatttttagtagagatggggtttcaccatgttggctatgctggtctcgaactcctgacctcaatctgcctgccttggcctcccaaagtgttgggattacaggcgtgagctaccacacccagcctaccagagaaatttaacaaggatattgaaataattaaaaaattaaacagaagtcttagaactgataaatagattttctcaactggaaaattcatcagaggctctcagtagcaaaatggatcaagcagaggaaagaagcagtgaccttgaagacaggctgtttgaaaatacaaagaggacaaaaaagaataaaaagcagtgaagatgacctacaggatgtagaaaattatttcaaaagaccaaatctaagaattgttggtcttcaagagggagttgagcaagagcaagggtagaaagcttattcaaagaaatagcagaaaactctccaaaacttgagaaggatataaatatccacatgcaggaaggccagaggacaccaaagagatttgtcccaaataaaaccaccccaaggtatataataaccaactctcagtggtcaaggacaaagagaggatcctaaaagtagcaagagaaaagtagcaaataaccctaatggagcttcagtcagtttgtcaacagacttcttagtacaaaccataaaggtaaggaaggagtggaatgacaccttcaatgtgctgaaagaaaaaaaaaatttaacatctaagaattgtatatccaacaaagttatccttcaaatatgaaggagagatacattctttcccagacagaagtttgagagaattgaccactaccagacccatcccacaagaaatgctaaagggagttcttccatttgaaatttaaaaaatgctaacacaccaaaaaaaaaaaaaaaaaaaaaaagaaaaagaaacacactggtaaaattaagtacatggacagagttagactcttaatactgcagttgataactctagtataaagcccaaaagacaaatctaccaagaatagtaatagctatggcagcctattcagagataggtaatgtagatacatgtaagttgagacaactaaattcaaaatgtggggaaagtggagctaagttgtagaagtttttttcccacttatttctttgtttctattttttaagataagttgtctttaaagtaacttgttatctacaagatgttttttgtaagccttgtgataaacacaaaacaaaaacctataatagattgactaaaaataaaaagcaatgaattaagacatactaccagaaaaaatcacttagccccaaagacagaaagaagagaggagttacaaaacaaccagaaaacaagcaataaaatggcagtagtaagtcctttcttatagataataacaacactgaatgtatatggactcagttctccaatttaaagcctgagtggctgaatggttaaagaaacaagccccaactatatactgcctacaagaaacccactttggctgggtgcagtggctcatgcctgtaatcccaatattttgggaggttgaggtgggaggatcacttgagcccaggagtttgaggccagcctgggcagcaaagtgagaccctggctctacaaaaaataaaactggctgagtgcagtggctcacacctgtaatcccagcactttgggaggccagggtgggaggattgcttgagcccaggagatggagaccagcctgggcaacaaactgagaccccatctctactaaaaaatacaaaaattagccagatgtggtggcatgtgcctgtagtcccagctacttggaagcctgaggtgagaggatcgtttaagcccaggaagtcaaggctgcagcgagctgtgattgtgccacagcactccagcctgggtgacagagcaagaccctatctcaaacgaacaaagcaaaaattagctgggcatgctggcatgtgcctgtggtcccagatacacagtaggctgaggcaggagagttgtttgagcctgagaggttgaggctgcagtgagccgtatttgtgcctctgcactccagcctgggtagcagagcatgaccatgtctcaaaaaaataacccaagaaagaaacccactttacctgtaaagatacacataaaatgaaagtgaagagctagtaaaggatatttcatgcaactggaaaccaaaaaagagcaggagtaagtaagtacacctacgtcagattaaaatagactacaaatctaagacttaagaacagctaggtgcagtggcttatacctgtaatctcattgctttgggaggcctagttgagatcacttgaagccaggagtttgtgattagcctgggcaaccctgtctctaaaacaaaatttaaaatttaaaaattagccaggaagctgggtgcggtggctcacgcctctaatcccagcactttgggaggccagggcgggtggatcacctgaggtcaggcattcaagaccagcctggccaacatggtgaaaccccatctctactagaaatacaaaaaactagcctggcatggaggtgggtgcctgtaatcgcagctacttgggaggctgaggcaggagaaccgcttgaacccagagggcggaggttgcagtgagctgagattgcgccattgcactccagcctgggcaacagaagtgaaactccatctcaaaaaaaattagccaggcatggtggtacatgcttgtagtcccagctacttgggaggctgaggtgggagaattccttgagcccaggagtttgaggttgcagtgagctatgattgtgccactctgcatgccaagtctgggtgacagtgaaactgtctcaaaagaaaaaaaagaaaagaccgtaaaaagaggaaaaaagggtcatataataataaaggggtcaattcagcaagaggacaattataaatatctatgcacctaacactggtacttccaagtacatataaaacaattagccaatctgatgggtgagagagactgcaatacaataatagaggactttgtcactccactcttagtaatggacagattatccaggcagcaaatcaacaaagagacatcagaattaaactacacagtagatacggaaatccttgaaaaaaatactagcaagctgaattcaacaacatattaaaaagatcagccaccacgatcaagtagattactcctgaggaggcaaggatggttcgatatacacaaataaagaaatgtgatacatcacattaacataaccaagaacaaaagccatatggttggccaggtgcagtggctcatgcctgtaatcccaacactttgggaggccgaggcgggtggatcacttgaggccaggagtttgagaccagcctggccaacatggtgaaactccgtctttacaaaaaattcaaaaaattagccgggcatggtggtgcacacctgcaatcccagctactctggaggctgaggcatgagaattgcttgaacctgggagatggtgttgcagtgagttgagattatgccactgcactccagcctgggtgatggagtgagagactgtctcaaaaaaaacaaacaacaacaacaacaaaaactgtatggttatatcaatagatgctgcacaagcattcagtaaaattcagcacctctttatgatacaaaccctcatcaaattgtgtgtcgaaggaacatacctcaaaataatgaaggccatccatacatgacaaacccacaactagcatcatactggatggggaagagttgaaggcctttcctctgagatctggaacaaggacgcccacttcagccagttttatttaatatagtattggaaattgcagccagaacacttaggcaagagaaataaagggcatccaaattggaaagcatgaagttaagtttgtcttgttcacagatgacacagtcttatatttagaaaaacttaaagacaccaccaaaaaactgttgactgataactttagtaaaatcacaggacacaaaatcagtacacaaaaatcattagcattaatatataccaacagtgaacagcctgaaaaagaaatcaaagcaatctcatttacaatggctacaaaacacacacatacacacacaacacagaccatctttccatttgtatgtgtgtcctcttcaatttctttcattggtgatatatatatatatctctctctaggaatatatatatatatctaggaatatatatatatctaggaatatatatatatctaggaatatatatatatatctaggaatatatatatatatctaggaatatatatatatatctaggaatatatatatatatctaggaatatatatatatatctaggaatatatatatatatctaggaatcaatttaaccaaagaagcgaaagatctgtaaaacaccaatgaaagaaattgaagaggacacacatacaaatggaaagatggtccgtggtcatggatttaggagaattaatattgttgaaatgacaatactatccaaagcaatttacagattcaatacaaatcctatcaaaataccaatgacatttttcacagaaacagaaaaatcttaaaatttatatggaactgtgaaataccctgtatagccaaagctatacttagcaaaggtaacaaagctggaggaatcacactatataacattaaaatttactacaaagctatagtaacccaatcagcatggcactggcataaaaactgacacgtagactaatggaacagaatagagtacccagaaacaaatccatgcattttgcagtcaactcatctgcaacaaaggcaccaagaatattcaatgagaaaaggaaagtctcttcaataaatggtggtaggatgactgggtaaccatttgcagaagaatgaaattaggccccatctctctccatatatacacaacaatcaaagtagattaaagacttaaatctaagacctgaaactatgaagccactagaggaaaacacttgggaaacagacattggtctgagcaaagatttgtgtgtgtgtaagacctcaaaagcataggcaaaaatagacaaatgggattgcatcaggctaagaagcctctgcacaataagggaaacaaagtgaagagacaagctacagaatgggagaaaatatttgcaaactacccatctcataagggattaataactacaatgtatgaagaagatttgttaaagaagcaaatcttatttaaacacaaaagattcaaataggcatttttcaaaagacgtaaatggccaagaggtatgtgaaaagatgctcaacatcactaatcattagagaaatgcaaagcaaaactacaatgggatatcctgtcaccacagtcaaaattgcttttatcaaaaagacaggcattcatccactgatggtgggaatgtaagttagtacagccactgtggagaatagtatggaggttcctcaaaagactaaaataagagttgccatatgatccagcaattccactattgggtatatatccaaaagaaatgaaatcgctgggcatggtggctcatgcctataatcctagcactttgggaggccaaggcaggtggattgcctgagctcaggagttcgagaccagcctgggcaacatggtgaaaccccgtctctactaaaaaagcaaaaacaaaccaaaaaaaaacccaaaaattatctaggcgtagtggtgcctgcgtgtaatcccagctacttgggaagctgaggcaggagaatcgcttgaacccgggaggtggaggttgcagtgagccaagatcgtgccactcactgcactccaacctgggcaacaagagcaaaactccgtccaaaaaaaaaaggaaagaatgaaatcctgtcatttgcagcaacatggatggaactggaagtcattatgttaaatgaaataagccaagcactgaaagacaagtatcacatggtctcacttgtggaggctaaaaaagtggatctcatgagaagatagactagattggtggtacgaaggtcagggaaagcgggggtctggggagatgaagagaagttgattaatgggtatgagtatgtggtttgatagaagaaataagacctagtgttaaacagatcaatagggtgactcttgtttacagtaatctattctagatttcaaaatagaagaattcgaatggttctagcataaagaaaagacaacccttggtgtccatgggatgaaagaaaaaaaaaaccgacaaatatttagggtgatagatacccgaactacacccagtttgatttttacaagttacattaatgtattatcacatgtactttaactatgtacatgtgcatcaataaaaataaaatgcaacagtaacaaaatgaacagccacattaccaaatgggcagaagacccaaacacctcactaaagagtctatacagacggcaagtaagtatatgaaaagattattagactgtgagaatggcctaaatccaaaatactgccgataccaaaaaatgctggtgaggatgtggagcaacagcagcattcattgctggtgggaatgcaaaatgacgtagccactttgggatgtaagtttagtgctttcttacaaaactaggcatactcttgccttttgattcagcagtcatgctccttggtatgcaattaaatgacttgagaagctttgtcccaaaacttgcacaaatatatttataacagctttattcataattgtcacaacttcgaagcatggaagatgtccttcaataggttaatggatgaatacactggtatattgagacagtggaatattattccatgctaaaaaggaatgagctattaagtcatgaacagacatggaggaatgttaatgcaaactactaagtgaaagaaggcaatttgaaaaggccatatactgtatgattccaagcatatgacattctagaagaagcaaaactgtggaaacaaaaaaaagatcagtggttgccaggggtaggaggaagagggggtgaatatgtagagtacagagaatttttagagcagtgaaactattttatatgatactgtggtggtgggaacatgtcgttacacatttgttaaaacccatagaatgtagcacatttaagagtgaaccctagtgtaaacgaagtgggtgatgatagtgtgccagtgtgggttcatcagttgtatcaaatgtgccactgtggtacagggtgcctgtagtagaggagtgtggatgtacaggggtgtggggcatatgggaaacctctgtattttctgctcaattttgctgagaacctgaaactgctaaaacgtttattaaaaaaataagaaaatacagttatgcattgcttcgtgatggcgatacattctcagaaatgcatcgtttggtgattttgtccttgtgcgaacgcggaatgtactgacaaaaacctagatgttatatagcctactacacatgtaggctacatggtatagcctattgctactaaactgaaaagctgtacagcacgttactgtactgaatgctgtaagcag[143 bp omitted]cgacactccgtctttacccaaaatacaaaaattagcagggtgtggtggcacatgcctgtaatcccagctacttgggagactgaggcaggagaatcgcttgaacttgggagttggaggttgcagtgagccgagatcatgccactgcattccagcctgggagacagagtgagattctgtctcaaaaaaaaaaaaaaaccccaaaaaacaaacaaaacccaaaaagcaacatagctaaacatagacaagatgtttggcagtatgatgttaccatggctagatgtcactaggcagtaagaatttttcagcccctataatctcatgtaaccactgttgtgtatgttttttgttgttgactaaaacgtgattattttgcatgtgactatgtgtctgagatttgtctcacagtatatatggagtgcatatggatggattggggatgatttgccatgagtgtatggttactggagctggctggtgcatacatgaattttataataatttttggtatctggtagggcaaatttccccacttactcaaaatgatcattacctttttgttaaactttttcttatgtaaacatttaaaaatagacaaaagtaggcaaaacagtataaagctatgttagacagtatataaagtattggcatgaaaatagacaatttttatagaacagagttccccaaatgggaccctcacaaatgtgaaaatttgaaatatgacaaagatgacattgtcaaaatgggaaaagactgggacaatgggcataggacaatgagaacgtctatacagataaagcaggtttcagtttcacacctgatacctgtgaacataatatatgatatattgagactgtgatattctaattaatgagtgaagtagttatcaacagtcaacaatgttgagggctaagaagtaactgcaaaagaacattaaggtttcaaaacctgcgacgtaagtaaagatgtaacatatacgcactgtaatgataaacccaaattcctgacagttgttacctcagaggaaggtagtgtatttgtgatgttttgtttcctgaagttaaaaagaaatggaaggagatgtagcaaaatattaaaaatgatggatctaggtgataggtaataggtgcccattataggattttttatattgtttctatgcttgaagtagtttataatgctttatagcattagtataggccaggcgtagtagctcatgcctgtaatcccagcactttgggaggctgaggtgggcagatcacttgagcctaggagttggagactagcctgggcagcatgacaaaactccctctctacaaaaaaatacaaaaattagctgggtgtattggcatgtgcctatagtcccagctacgtgggaagctgaggtgagaggatcacttcagcctgggaggcagagattgcagtgagctgaggtcgcaccactgcactctagcctgggcgatagag[142 bp omitted]aaccctgtctctactaaaactacaaaaattcgccaggcgcagtggcaggcgcctgtaatctcagct[131 bp omitted]gtacttgaatcttgttttgatcttaatttaaacaaatattcagaaagacttttttttttttttttttttgtcaattggagaagttttaccagagatttggtattagttatcaggcagttgttaattttgttttgtgtgacagtggtactttgtttatataagaaactgtccatatttttagagatgcatctgtacagtacgttagataatgtagtatttctggggcttgctttaaaatactacaggaaagaaaaaggatagtttaaataagcatggcaggctgggtgtggtggctcacgcctgtaatcctagcactttgggaggctgaggcgggcgatcacctgaggtcaggagttcaagacaagcctggccaacaaggcgaaaccccgtctctactaaaaaatacaaaaattagctgggcgtggtggcacgcgcctgtaatcccagctacttgggaggctgaagcaggacaatctgttgaacccgggaggcagaggttgcagtgagccaagatcgtgccactgcactctagcctgggcaacaagagcgagactccgtctcaaaaaaataaataagcatggcaaatcttaataccttttgagtcttggtgaaagctatatgaaggattgttgtagtataccctcaacttttgaatatgtttgaaaatcttaataattacatatacagcagtaaaagcaataaacgaatgttagaactcctactgttggcaaacataatgtttgaaatgctttactacaaaaaattaagattttctaactttattttaaatttctgtctcctgtttttttgtatttatatatataaatataacattcatatatatgttcatatatatatatatatatatatatataactaaagttactgttgaccaagtcttcctccaggctctctatttcacttttaagtgccaaaaatggatatttaggcttggtatttgtttacagtttttctgttcataatgacaacatggtagtgaatagctctgggtaatctccagcaaatcaaaagtaccagaggtaattagcatgaggacctgttaagtgtataaacttgagccttgataaaattgtagtacccaaaaatgaataaagtatcccagaaataatgctttttcttttttcacattttatgaaacagtttaacactcagaatacagagttgacacacataaacttttcctttgtggtttcacgtgtttacatctttctgggtctgtctatttgcatgcctaccacaacttcccaggtgtctgtctttaagggacttcacacaattacttttttaattaatgttcttaaaactgtctttggctagagattcaaaatattttaagagtgatggaaactgatgttgagagagtaaagatttcaaaacaacttagcatgactaggtgtttccctctgtgactttgactaccaaatcattaactcctgtgataacaatgaacatttcacaacgtttaaaagttctcttattttactattggatttttataagtagttagaaatttatgcaagaaagtattgccactgtcttcatgaggaaactgaggcttgagaatcttgtgatttccttaaagtcatacagctggttagcggtagaattagaccttaaatcagtttattttcatggtcagtttggctcagttattgtgctttggagaggaaattgatacttttacaaagatgaagaattttttttttcataaataccttacaactttagatgctaaaaggcgtaagttaaggccgggcgcggtggctcacacctgtaatcccaacgctttgggaggctgaggcgggaggatcatttcagcccaggaggccaagaccagcctgggcagcgtagtgaaactttgtctctacaagaaatttcaaaaattagccgggcgtgatggtgcatgcctgcagtcctagctactcaggaggctgaggtggggggatcgcttgagcccaggaatttgaggttatagtggtctatgtttgcgtcactgcactccagcctgtgcgacaattgagaccctatctcttaacttttttttttttttttttttttttttttaaagaaacacagcggctgactgggaaaagttttgtaagagaagacagacttaatatccagaatatataaaatgctcttacagatcagaaggaaaatcattcattagaagcaaatgtaaagaatgtcaccaaagaggaaatgagtcactagtacatatatgagaagatgctcaaactccttattaacagggaaaatgtagattaaagtgaccatttgctacccatgatatttacaagaatttttaaaagatggaaaatagtgactgttgttaagggtatgggaaaacaatcacacatccctgtatactgttgataagttcatcttttttttgaagttagtttggccaaacatatgttctgcctgggcttaaaccatgtagtaggcacattacatcaacttagtatttaaaagatggtaagagggagccgagaaattaatgctaactttaaagaacatacgtctagtcactgccatgtgctctggctttcttttctcttttattaaacattttttgaatgtttgtggaaggtaatgtactaattagcgtttccaataaattatcattacaacaaccttgtgaggtggctgtttttaacttccattttgcagatgtggaaacttaggccagagagattaaataacatgaccaagttcatttagtcagcagacgggaatgcgtaaattgagctctaaaaccatgactgtaactactggatcattagatagatagtaacaattgatttgtgatacccagcttaccttaaatctcacctctattaaaagggtgtcattttgtatgtttatattttaaaatttaataccttatttctttattggaatgccagtctgatcaaagtgaacattaatggactatcttttacttttctctccagaggatctgaagaggcaaaatgcagtattacaagctgcacaagatgatttgggacaccttcgaacccagctgtgggaagctcaagcagagatggagaatattaaggcgattgccacagtctctgagaacaccaagcaagaagctatagatgaagtgaaaagacagtggagagaagaagttgcttcacttcaggctgttatgaaaggtaaagacagagaaagatcaattttgtgattttctaagatatccgattctgatgattgagaatattttcagagaatcttaaaatatatacagagtttcatttgtggttttatgtactgtcatcatcaagatatactttcagataaaagagaagtcactaataacataaatggatatatcaatcgtatctaacttaataatggagagttataatagggatgttatagagataatgcattaaatgaggactatagttcattgtaaggcttaaaagtcgatttcttctaggaggcaggctagtaatctcaaataattaagctgtatgggcacagggaatgtgctggagtagagagagctgccatgcaaagggtaaagtaactgtttacattgatgagcttcagctaattattgcccttccagtgtagtttggccatacgttttagaatttttttttttttttttttttgagatggaatctcgctctgttgtccagcttggagtgcagtggcgcagtctcagctcactgtactcgctgcaacctctgcctcccgggctcaagcgattctcctgcctcagcctcccgagtagctgggattacaagcatgtgccaccacgcccagctaattttgtatttttagtagagacgggatttcgccatgttggtcaggctggtcttgaactcctgagacctcaggtgatccacctgcctcggcctcccaaagtcctgggattacatgtgtgagccacagcgcctggcctggtttagattttttaagaaactttgtatgtgaaatcttcactgcactctgttgggtagaatggcctatgggctaaggtaggcttcatgggctgccagcttatgacctttcgtctaaaagaagagacgtagtttagtctcagactccttttggcactagtgctgaattacttcccaaatttctgagaagatgatgatgaaacaaagtaagtggtcactgaatctttgagttcctggaattagttaatattctattttattttttactttttgagatggagtctcactctgttgcccaggctggagtgcagcggcaccatctcggttcagtgcaacctccgccttccaggttcaagcgattctcctgcctcagtctctcaagtagctgggactacaggcgcccgccac[174 bp omitted]agtgatgactttttccaccgtgtttgcaattgtgtatcactttttgccttagtgctctttataaaaaggcaggtgaggctagccctatttctgagtgtatagctatggcctagagattactctaggcttcatataacaaacccaactacagtggcttaccaaattaggagttcctttttctcccagaacacgaaatccaaaggtagataatctaggcctggttttgtattggttccatgatgtcaacaatgcctcaaactccttcagcccttctgttctttcatccttagcatatggttttcaacttaatctttgcctcagctgaaaaatagctgcttctccttcagtctgcatcagaaaagcaaaaattttctagaagtacccagcatatccctttcgctttgttgaccaagtgtgtggtcactcataactacaagggaaactggacaatgtagttttaaaattgcgcacattgatttcctaaacaaaattggagtcttactggtaaggaagaaggagtggaaattaatgggcaatcaacagggtctgttacctagtggtttttttttttttttttgagatacttaggcttgagtgcagtggtgtgatcttggctcactgcaacctccgcctcctgggttcaggcaattttcgtgcctctgccttccaagtagctgggaccacagacatggcgacatcacacccaaataatcttttcttttttttccctttcccttcccctttccttctcttttttttgagacagagtctcactctgtcacccaggctggagtgcggtggcatgatctcggctcactgcaacctctgcctcccgggttcacgtgattctcctgcctcagccttccgagtagctgggactacaggtgcctgtcaccacgcccagctaatttttgtatttttagtaga[144 bp omitted]tgccatgtcggccaggcttgtcttgaaatcctggcttcaagtgatctgcccgtctgcctcccacagtgctagggttacaggtgtgtgtgagccactatgcccggccacgttttaagattatattaaagagaaagcgatttttttaaagaccttatagagtttgcctcaacttacaatcttgggttctggtaaactattccagaaatatatcccttttcgtatactttcaggtagtgggattggggcgacatgttatatttgccttgggagccatagtatagtgtctaagaacatagattttggagttggccttaagttcgaattctagctttgcttcattctgggcatgaaacattggccagactatttaatctttcctaaggttttctccttcgtaaaataatatatgacacaggtttattgtgaagattagaagtgatgatttaaagcccttatttctgtatataataagaactacaactagtttgtcttgttttttagtgaattaaacattttccagaaattagacgtaagctttttatataactttaaaaaatttagtgtgccaggttatttttttttcataatgcttagatgtgaaatatgtggtgatgttttgtagaaacagttcgtgactatgagcaccagttccaccttaggctggagcaggagcgaacacagtgggcacagtatagagaatccgcagagagggaaatagctgatttaagaagaaggctgtctgaaggtcaagaggaggaaaatttagaaaatgaaatgaaaaaggtatgaaggaatgtgttcatttgtagaaatatttgaattcaaatgcaaaatgctttaatattgttgtgtaatagaaagtaatagaagtactttgatatttcctgtgagaataattatttggacacagacctaaacatagtactaaataatgttatatctatggctaactctctcaccttcttcacatttttgatcaaatatcactacttcatggggtttttcccgaccacccgccatttaacattgcaacctgccaacttccctctgccacctgtcactactctcctctcccttatccttctctagtttttctctttccatagcacatatttccttatactacacagagttcacctattgtgtttattgtttactgtctttctttccttgctaaaatataagctctgtgaaggcaggagtttctctttctctctttttttttaatagcttcaggggtacatgtgcttgttttttatttgtatatcctaaatgcctagcatagtgtctaggagataggtgcttgaactcctaaataccagttgagtgggtgttgttgcttgatgattgtgtctaaagcaaagttttagaatagatgttagttttccttctttctcggtatcctttggtttctgtgtaccacatattatgtaccacatatgcttgaacataataccatataatacttgaacatagggcaactaaatgtaaattgagacattttatcattgagaaaatattaaaagctttttagctagtttaaataaacttttacattattttatatgcatacacatttaaaatcacattgtataaaataattagtaattgatttttcttttcaattgaattgatcatgcctttttggttcctaattcttagttcattcttcaaatgcatgtatattcatgatttccacagtctttcaattttagaactgtttttgattatctgaaaaattgggaagatagtacagagttcctatatactccatgcctagtttctcctgttgttaatgttttacattagcatggtacatttgtcacagctaataagcctctatcaatttattcttattaactgaagtccatttttgtattcagattgcattagtttttacctaatgtccttttttttctgttctaggatcccatccaggataccatattgcatttagttgtgtctccttagatgcctcttggctgtgacagtttctcagatttttcttgtttttaatgacctttctgtcattttttaaagtgctttttaaaggttttgtttatgatgacattcagcacttggaattgtgaagtcatatttatattaataaataacttgatttgtgatcagttctttgcttcctccctccttttttttcctgttgttttttatcagatgacctttataagcatcctaaactagccttgactgagatattttaacttgtcttttccaaatagtatttaattcaaaataaaataaatgatggctttgtgtaaggacctgaaaacaaagtgaatctgaacctgttttttgaggggtatgttatttggggaaaatccccctcacgtttgggcatttatgatatttttccctatcgtgcacaacttagtataactttgcactcatttaaattcagtgaattaggttttcagtttctctagaaggaaaaaagccaactttttgagcctgcctttgtttctctgcgtgtaagtgtatgtgtatataagaaatgaaaattcattttctcaccagtttactagtttatgtaagttggttccttttaatccatgtttttgagaatggacttgggaaagcaatgatagttttaaggggtcactctttgtgtttgtttcatttagatggtaaaagtaaaatagtatttaaagtactctgtttaattggatggaagcctttttatagcaacataattttctaacattttagaaaacacgttattctattttgggtgtttaaaatgtaatcagccctttcattattcataagaaattattgtctc[187 bp omitted]tgggtatggtggcaggcgcctgtagtcccagttactcgggaggctgaggcaggagaatggtgtgaacctgggaggtggagcttgcagtgagcggagatcgtggcactgcactccagcctgggtgacagagcgagactccgtctcaaaaaaaaaaatttatttattatgtgtatttccttttatatatgggatattttcttaattgattaagaagtcaaatttgttttagtgaatcaattttcccatttactcccgaattctaaatggaatatttgggaaaactcagttataccttgacattcaaagtaatgcactatttgaaagttagacattagttcagttttgcgaatattaatatagtgtctggtcaagttacttgttataataatttttagcaaatggaagggttagagtttcttagaaaagcagtaaatgaataagtcgtagcatttaattctttttaaccataggcccaagaggatgctgagaaacttcggtccgttgtgatgccaatggaaaaggaaattgcagctttgaaggataaactgacagaggctgaagacaaaattaaagagctggaggcctcaaaggttatgaaacattgtaatccatttgcttgaaacccaagtttctgccccaatgccatgaacaaaattagaatcagtaatagggaaaaaaacctgtaatttag[137 bp omitted]catggagaaaccccatctctactaaaaatacaaattaaccaggcatggtggcgcatgcctgtaatcccggctgctcccagcctcgggaggctgaggcaggagaatcgcttgaagcccggtggcggaggttgcagtgagctgagattgtgcctttgcactccggcctgggcaacaggagcgaaattctgtctcaataataaaaaataaatttaaatgcaaaaaactgctttgagatggttttgctcttatggacatttaaaataatcacaataatgatgttttatcacaagtggctgctttgtcacaaagttaatgttcattttcttaagaaaatgagaccccgtctcattcattttcctattaaggaaaataaactgttcgaagttgaccttgttttctgatgccagctccagcattgatcttttagagataatgtagctatagtattgctgaatttgttggccataaagacacagcaaaagaattaaagtaggaacaggccaggtgttgtggctcacacctgtaatcccaatacttcaggaagctgaggcgggagaattgcttgtgcccaggaatttgagaccagcctgggcaacatagtgagacccctgtctctacaaaaattttttaaaaagccagacacggtggtgcatgcctgttgtcccacctacttgggagactgagatgggaggattacttcagcccgggagtttgagactacagtgaactggcactccagactgggtgacagagtgagaccctgtcccccacacccaaagaaaaaaaggaagaaagtaggaacaaaagaagcataagaaaataaaaacaatatgaaaataaatgggaatttatcaatagtcttggtaaatgtaaactgatacctatgtttaaaagagattatcacattggattgtaaaaatctaactttatgttacttgtaagagctatgcctaaaatcaaaccacaaggtaagactgaaaatattagccagttatagtggtgtgtgcctgtggtcccggctacttgagaggctgagatgggagaattacttcaacccaaaaggttgaagttgcagtgaaccatgatcatgccactgcactccagtctacgtgatagagtgagactctgtcttaaaagaagcctgggcgcggtggctcatgcctataatcccagcactttgggaggctgaggtgggtggatcacctgaggtcaggagttcgagaccagcctggccaacatggtgaaaccctgtctctactaaaaatacaaaaattagccaggcgtggtggccacgcgccttgtagtcccttctacttgggaggctgaggcaggagaattgctcaaacccaggaggtggagattgttgcagttacctgagactgtaccactgcactccagcctgggcgacagagtgagactccatctcaaaaaaagaaagaaaaaaatactgaaaataaagggataaaaatataccatgtaaattcgaaccaaaagaaagctgatataccaagtgtagtatcacaaagataggataagggggaaaagccactaatagagataaagagggatcctatctaataaacagttcatcaataagatataatagtcatgaacttgaatgcaccttacatagtcatgaaatgcataaactaataatgacaattacaaggagaaactgactttcacaaatatagtagcagattaaaattgacctttacagaatacaatcagaaaaaattattagtagagctatagacattttgaactatcaggttagttatttagttgtaattgacacacagaactcggtatccaagagtgagatggtatcgcatacagtactagaacataatagttaagagctcagcatttagtagcctgggttaccttgggcaaattacttaatcatactgtgctttgattttctcaactgtgaaatggggataataagcccaccttaatagtcaccatatggctattatgaggaacatataaattaatccctatagtagccactgtatggctattatgaggaacatataaattaatacctataaacctttaggatagtacctgggacaaggtatagttatttttagatacattatcttagaattgaggttacacagacccaattctgtaactatgggttattcaggtatttacgctaaaatgatagttaaaatgcttggacatgaaaaaaatactcatggaaaaagtaattacaaaatatttagaatgatgtgaataatgccagatctttaaaaaaaaaaaaaaagtacaaactgagccgggcgcagtggctcatgcctgtaatcccagcactttgggaggctgaggtgggtggatcgcctgaggtcaggagttcgagaccagcctggccaacgtagtgaaaccccatctctactaaaaatgcaaaaaattagctgggcgtggtggcgggcgcctataatcccagctactggggaggctgaggcaggagaattgcttgaacccaggaggcagaggttgcagtgagctgagatcttgccattgcactccagcctgggcaacaagagcaaaactccgtctcaaaaaaaaaaaaaagtacaaacaaaataaatggaaatgaataatataaacataggaatttgtgaaatagaaaagcaaaagaacaatagagactatcaatataatgaaaaaatggaaaaactatagacaaatctctggtaagactgatcaggaaaaatgaaaacaaaaatgagaaatcagaagtgagtccgagtgtagaggctcatgcctgtaatcctagcactttgtgaggctgaggcagaaggatcacttgagcccaaggagttgaggctgtggtgagccatggtggctccactgcacgccagcctgggcaagggagcctgtcttaaaaaaaagaacataactacaaatcagtagaaatttaaaaataacaaatactataaactgtcacacaaataaatttgaaaacagatgaaaaaatttctaataaaagataattagcccaaattattccaaaacaggaaaggtagtcagtaattattaaagaaagtggatctagagtaaaaaatcttattgtctcttgcctcctctcaccaaaagatattaaactgttgattttacaggtaagtttttccagactttctggaaagagcaaattcttatattttacgaactctcagggaatacaaaaagagagaaagctctccaactgtttttatgagactagtagatcttcactacaagtgagcaaacacatagaaaggtagtatgagaagaaattatagatctgtctcaggaatacagaagctaaaattttcaacatcgtaggtaaaataaagggggagaaatacatcatgaccaagtagggtgtattcccagaaatttatcggaaaatctatcattgcagtgtacacgtgaaatgattgtagaagaacagcattatattcattttggattcagagaggtatttgagaaatttgaccactcaataacttagtaaagggctatttatcaaacctttggcaaacatagttaagggtgaatatttagcagccttaccattaatggtgggaacattctggggcagacccatgctcagtaattcagaaatgaggcataagaactggaaagaaagcaacgagactgattcaattgtctgtataaagaaaccagagaatgtacaacagattgttagacctaataagagttcaacaatttgaaagttgttcaaacaaaatcaacatactaagataattgtttttctatgccccagtgataaccagttgaagaatgcagtggtggaaaaaagattgatcctattcacaagagtaaaaaaaaagaaaaaaaagaaaaagaaaaactagttagctaccaatatagctaaataaagatgggcagggtccttatagactacataataaatgaggacctgaatctgtattttcctgaatgaaaagatagagcattgggccgggtgcagtggctcacgtctgtaatcccagcactttaggaggccaaggtagggggatcacctgaggttaggagtttgagaccagcctggccagcatggtgaaacccagtctctactaaaagtacaaaaattagtcgagcatggttgcggaagcctgtagtgccaatctctcaggaggcagaggttgcagtgagctgaggtcgtgccactgcactccagcctgggcagtagagcgagactctgtctcacacacacacagcattataaagtagacattgtatccccaaatttttaaattttacttaaatttcaatagggtttaattaggaacttgataattcagttctagaagtagacttcatatagagaagtgaaggaacaggaaaatacttagcaaaattttgaagacaagatgaggagacttggcctacctaccagatagcaggaccacagtaaagctactataattaaggtagtttgttactggtttagggataaacaaatggatcaataaaacagaaagcccagaaacagacctatatatgtgtaaatttgatatatgacaggtggcattacaaatcagtgggtgaagaatggattgttaaaaaataccctttttggctgagtgtggtggctcgcgcctgccatctcagcactttgggaggccaaggcaggtgggtcacctgaggtcaggagttcgggaccagcctggccaacatggtgaaaccctgcctctactaaaaatgcaaaaattagctgggcatccgcctgtaatcccagctacttggggggctgaggcaggagaatcgcttgaacctgggaggcggaggttgcggggagccaagatcgcaccattgcactccagcctaggcgacgagtgaaactccgtctcaaaataaataaattattatctggccatgtgcggtggctcatgcctgtaattccagcactttgggaggctgaggtgggcagattgcttgagcttaggagttcaagaccagccagcacaacatagtgaaactctttctttacaaaaaatacaaaaattagccagatgtggtggtgcatacctgtagtcccagctactcgggacgaggcatgagaatcatgagaatcacttgaacccaggaggtggaagttgcagtgagctgagattgggccactgcactccagcccgggagacaggtttatttctaaaccggtaacgaactatcttaattatagtagctttacttcaagtcgtactatctgataggtagacccactctctccaccttgttgtcttcaaaaagatttctttctttcttttctctttttttttttttttttttttttgagtcagggtcttgctgtgttgcctaggctggagtgtagtggcatgatcttggctcactgcaccctccacctcccaggttcaagcgattctcctgcttcagcctctcaagtagctgggattacaggcgtgcaccactgcacctggctaatttttgtatttttagtagagacggggttttgtcatgttggccaggctggtctcgaacccctgacctcatgtgatccactcaccttggcctcccaaagtgctgggattacaggcatgagtcactgtgcctggcccaaggtttcctaaataagacaaaaatattgactgtgaaaggaaaactggcaagtttagctacattataatataaagttctttgttaaaagatactattaatacaaaaagttgaaaagagaagctacagactataagaagatatcaatacctcataactgacaaaatattaatatccaaaataataaaattgctaagttggctggacgtggtagctcacacctgtaatcccagtatttagattgcttgagaccaggagtttgagaccagcctgggcaacatggagaaaccctgtctctactaaaaatacaaaaattagccgggcatggtggtgcacgcctataatcccagctacttgggaggctgaggcacaagaattacttgaacccgggagatggaggctgcagtgagcgtaggttgtgccactgcactccagccagagcaacagagtgagactctctctcaaaattgccaagtccacaagtga[136 bp omitted]ccggtctctactaaaaatatgaaaaattagccgggcgtggtggcgggcacctgtagtcccagctacttgggaggctgagtcaggataatggcgtgaacccgggaggcggagcttgcag[131 bp omitted]acttgggaggctgaggcataagaattgcttgaacccaggagccagaggttgacgttgcagtaagctgagatcgcggcaccaccctccagcctgggcgacagatcgagactccgtctcagaaaaaaaaataaaaaaaaataaacaggtaaagtgtatgagctgtcggttaacaaaagaggaaaccagaatagtcaaggagtgtgaaaagatagtcaacattcaaccacactagaaattggggaaatgtaaatgaaagtgggacatcattttaccctaaccaggttgtaagggttatagagaaattggttgcattcaccgactactggtgtatgtgaaactcttccgtttaaggcactgttgtcacattgtcctcccagttgactgtttttggtttctcatgaccctcattgcttctctgtattttctcctgcatagatcctgataccacgtacatttttctgaataggtggctttcagtggtttgtttgtaccctctccttgtcacctggctttttgtagatgtccatttgttgttggttttggtcattccagggtatggaactcaaagtaattcaaatagtatgtcactattgccatcatcttcccagggtcctgctcagtagttttcaaatattagaaattcattattaattaaaccaaatgtttattccaaaaagtaataactggtagaattagtgggttatataccaccattttaaatctgccatacggactcttttaccatcagctgaattaccaccgtcctcaggtgttagagaaagtatttcatgatagttgcaactttaccattctttgttcatatcatgtgctggactgtcaaccttcagtgaagcatcaaatgattgcttaaatggtcatttaagtctttgactattattgcatgatggcctaggagtaaagataactgaaaacagataagccactttaagtttgaagaaataggaagataaaaggcatgaaaaggaccttgaatgtgatattagatataaccatttgaaaaagttgaaagttaactaaagggttagaatttagaatggacaatttatgtgacagtctaaagtgacgtaatccttgattttctggggaagaattgtattttttttggttataactttcctatattagactatattgttactattttgagtattacacttaattgatcaacagaaaaaaagtattttttttaaagatgtggttttattttattgttattttttggaaacagggtttctccgtgtttcccaggctggtctcaaactcctgagctcaagcattctgcccacctttgcctcccaaagtgctaggattacaggcgtgagccaccacacctgggcaagatgtgattttaaaaagtattctgcatttgcctttaagtcattacagtgtgagactagttatttgttccattataatttcctcttttttacttccatgagtatatgtatctgtgaaaatgtcttctttttatacatttaaagcatttggaattccctcaccagaagtaaaaggaaagcaaacttaaaagtgtatggtatcgtttttgtccttagaaattaactaccgatttaaaaaagcaaaacatacctggtgttactgttatggctgaaacagatacatgcatatgttgatgtgggaatacaaattggagccgcctttttgaaaagcaagggacaaagctgttatgtgaaatctcaattgtatattttattctggtggtgtgattatggataacatctattaagttattttcccagttttctatagtacatattttataattaaaaattataaatgttaatttatgtagatgtaaaagtaagtgtaaatttttttgaggcatagccagaacttaccatcattctgtatctaagatagaaactgttgtaaatttcagtttaatggaattgcatcttctttcaggttaaagaactgaatcattatctggaagctgagaaatcttgtaggactgatctagagatgtatgtagctgttttgaatactcagaaatctgttctacaggaagatgctgagaaactgcggaaagaattgcatgaaggtaaatatactgtatatttttatctttgtctctaagaaccatataagttaaattgatgttgactaataacagtgacaaatcttaaaataacaatgcaacatgttagtgattcaatttaagccttgtagttggtttaaatgtactcatgcaaagctgaaattatggtttttccttcgtgagctcagtaataacttcacaaggtggctgggtacagtggctcactcctataatcccagcactttgggaggccaaggtgggcagatcacctaaggtcaggagtttgagaccagcctggccaacatggcgaaaacccgtctctactgcaaaaacaaaaattatccaggtgtggtgatgcgcacctgttatcccagctactcaggaggttgaggcacgagaatcacttgaacccaggaggcagaggttgcggtgagccaagctcacaccactgcactctgtcctgggcgacagagcgagacttcatctcaaaacaaacaaacaaacaaacaaacaaacaaacaaacaaacaaaacatcaccaggcgtgagctctgggcagagagataataaagctgggaatttctgcttcaactacttttccccccacactcattttgatggaggtgtattagcaaaagtgaaaatggaagagggcagagagtgtattctggaggccctaagtaacactctgtttttaaggggacaattttgatttcactagtctggtagctcagtgatacagaaattgactctattttccaggggtacattctttccccactaaaatattatgaaaataacccaaactttgagtgaagttttggccttcaggaaacaatttccaagtgtgctattgcaataaaaagacactcatattcttaaaggtgtccaaaagaactagttcagtttaaactatgtccctctaacacttccagaaataatgtaaattattgagactaccaaccttcctaataaaccttgaaaagtatccgagaaggttaattaaaatgaggaaggacatggagtaatttccatactgaaacactcacaataaaaaatagagtcttttttttgagacagaggttcattcttgttgcccaggctggagtgcagtggtgtgatctcggctcactgcaacctccacctcctgggttcaagtgattctcctgcttcagcctcctaagtagctgggattacaggcatgcgccaccatgcctggctaattttgtatttttagtagagatggggtgtttctccgtg[137 bp omitted]ttggaaggtgggtaggggattgtcaggtagtcagagagaagcatggcattcaaggccatttgcatgtgatgcagctaggtaaggaagtctaagaaaagcagttcagcacaattagaatacaagaggcaatgggcaaaatgtgaggttggagcagtagaaacaggccaggacatagaggtcttatgctaagaatattggacttgatcatctgggcagttcggatcctc[133 bp omitted]gcctcccaagtagctgggactacggatgcccaccaccatgcctggctaatttttttgtatttttagtagagatgggatttcactgtgttagccaggatggtctcgatcccctgacctcgtgatccgcccacctcggcctcccagagtggtgggattacaggcatgagccactgcgcccggcctattttctcttaaataatagttttattaagataaaatttgcatgccataaagttcactcgttaaagtatacaattcagtagtttttaatatattcacaaaattgtgccccatcaccactgtctaattccaaacattttcattacctcaaaaagaaatcctgtacccatttactgtcatttcctatgtctctacctccagcccttggcaaccactaatctactttctatctctgtggacttgcctattctggactttgatgtgaatgggattttataatatgtgcctttttgtgtctggcttcagtgaagggttttagactggagagcggtaatattagttttgcgttttagaaagttcagtctcatagcactgtggtgaatagaatagggagggcaagactgagggcagaagaataaaaaaggggcctctgttgtagttgtttaagtcataagtgctggtctaaggcagaagccagaagatagatatatcatattgcagagaaggccgagttagcaggtctctgtcatagttgaatatgttggggtgaggaaaaatcagaagtatgagttggcttgggtggcttggtagatgggtggatagatcatgctacctattctctttttagcagaagatggctgagctgatgagtatcaacaacacatacattttacaaagattccttgacttgtcataagaagtctatattaaccggacccaacgaggatttctggataacagatttatcagaatgtattaaacacaattaggagtgtttattccacctttggcctttggagcaatgtttcccaaagtatattccctagagtacttgttatttgagttgtactgtgaaaagtttttttttttcttttgtcaaataaatttgggaaaggctatattatatattaccttccaagaaaacatagacataattaagaccccgagttcaaagtcctgcagtaaagaaatctttaaaaatttatttaattatggaggagcctttgcaaaataacaataataataaatttctccctttaacttgaagtttctaagacttactaagaacagaaatctttctttgctgtattcctaggagtgcactttgggagactctgctttaaagagatggtgtggggataggttgccccttggtccagccaaggacagaatcctagagatgtggaccattggtcagacctgggctaggagccctgtgctaaagaaattgcctaccattggccgggcgcggtg[311 bp omitted]atttgtggtgggggggttcctaaacagtttgccatctcttggagcaagagcgacaacaacacaaccagttaaaacatacgtggcagaaggccaatgaccagtttctggaatctcagcgtttactgatgagagacatgcagcgaatggagattgtgctaacttcagaacagctccgacaagttgaagaactgaagaagaaagatcaggtgaatagaagtttttaggactgatttgctttgtcagtaatgtcccccaccacatgtgattgcattaccttatgtgtattagagactgacttaagctgcaacaaggtgataaaggtgatatgtgccacttttaaaaacataacagctacatttgaggggttttgtttttcatctttagaaatggcctcctctcgggggtggggaaactgatttggaaatgatcttcagtgactgcaggatgcagcagtgcgtatttcggagaaaatctttctctcctgtgctgaccagttctcccaggccaagtcttgaggtcaagcttgtccaacctgcagctcttggctttgaatgcggcccaacacaaatttgtaaactttcttaaaacattatgagattttttttgcaatcttttttgtttgttttagctcatcagctatcgttagcgtcagtgtattttgtgtgtagccaagacagttcttcttcagtgtggcccagggaagccaaaagattggacacctgctctaagagctctactaggtgacatgatatgaatggagaggctgagtaataggaggtggcaggtgttcagagcactgcatattcaggttcctgttttctccttatcttttagttattgaaattgcatgaataatatatatatttatatacattatcataaattttttgttttaaatacagtgaaaaaataaatataaagtgatcaagtgaaaagtcttccttaacatctcccacacctccccttgtcagaagattgttttaccatttggtagagagccttctaaaccagttctgtgtgtttatgatatacatttagggtgtagttttcctcttacacaactatagttatactataagtatgtattctaggcagggcatggtagcttatgtctgtaatcccaacactttgggaggctgaggcaggaggatcgcttgagcccaaaaggccaagaccagcctgggccatatagtgagactctgtttctacaataataataagaagaataattagctgggcatggtggcacgtgcctgtagttccagctacttgggaggctgaggtgggaggatcacttgatccgggaggcggaggctgcagtgagctgtgatcacaccactgcacttcagctgtgggtgacaaagcaagatcctatctcaaaaaaaagtatatatatttcccataagcattatcctggatgtattttcatatcgacgttgtattttgttcttgagtgtagatggatgcaccatattgatttaccctttctccttgtagcgtgtatctaggtggtcccccttttcttgtcatctcaaataatcttgcagctaaatccttgaccgtattgtgtatatgtgcagatacttccctaggatagctatgtaaaagtgttcactgcctttctaagtatcttgtcaaacgtttcaaattgctttatgtgacttaggttagattttgttttgcaaagtttcttcttttttaaatttcctttttgtctcttaatttggactcattcgtcttgtgtgtagtcaaagccaacataaggatttttttttttcttttttttgagacaggatttcactccagtcacccaggctggagcacagtggcacaatcttggctcactgcaacctccgcctcccaggctcaagtgattcttctgtctcagccgcccaagtagctgggactacaggcgtgtgccaccatgcctggctaacttttgtatttttagtagagacagggtttcac[259 bp omitted]cggaaccccacctctactaaaaatacaaaaattagccaggtgtggtggcatgtgcctgtagtaccagctacttgggaagctgaggcaggagaatcacttgaacccaggaggcggaggttgcagtgagccgagatcacatcactgcactccagcctgggtgacaaagtgagactccctctcaaaaaacaaaaacaaaaacaaagagtctaaactttactaagatgatcatttaaaacttttcaacatttattgagctcttactatgtgctagcattgtgctaaggctttatgtataaatctttatgtcaagtggttatcaaaaactctccataagcagtagggactacaattatacggttcctgtgttctagaatagtaaacaggctgagacgtcatgtatggcccatctgaggcttgaacaatctctgattccagagtctaagtgcttactcaccacctctttctccatgtcctttacttctcatgtgcctgcccatttttcatccatataacattacacagaactcctccacaggcctgcttttccatgtttctgtcttttgtatgtgcctcctttctccctggaacccttaattgtctcttctcatgcaactggcaaacttaccttactgatctttcaagattcagctgaagtgttactcctttgggcctcctttgctggttccttcagatgaaatcagtcattgtttttctccttctttagaaccttgtacatacttgtattgtaattgtttgtctctcctccctaggctgttttacgtgacactgaaggtataaggtatcttactcatctttgttgagtgaattattctatcaactttaatcattccttttgtattcatatacatttgttaatgtttctaatggatgtgtaacattataaaaacttttttgggtggggtgtggtgtctcatgcctgtagtcccaacgctttgggaggccaaggtgggaggatcgcttgagcctgggagtttgagaccagccaggacaacagcgtgagaccccatctatgcaaaaaaaccaaaaaattagccaggcatggtggtgcatgcctgtgatcccggctacacgagaggatgaggcaggaggattgcttgagcccaggagttcaagaccagcctgggcaacaatgtgaaaccccgtctctacaaaaaataaaaaaattaggcgggcgtggtggcacatgcctatgattccagctatgtggagaggatgaggtgggagaattgcttgaacccaggaggttgaggctgcagtgaaccatatttgcaccactgcattccagcctgagtgtcagagcaagaccttgtctcaaaaacaaactttttcatatttattttctacagtaatcacaaggaatgttctgtgtaaattttttttttcaaggatcatttgaagaggcggttttgctttcttttattttgccttactttatacagtatacttttcttggaagctgcttcctgatttcttctttataccagtgttcttagtttgtgcttataatattaaaatattttgtaatggccagaggcccttagatgggattacaaaacaaagaagcgtaagtatccagttttctcttatcataacgctctgttctttatttgttttgaatggttaaagaactgtgtcacttattaagtaggttacttgggtcatatatatgtttttttcttccttttaggaggatgatgaacaacaaagactcaataagagaaaggatcacaaaaaagcagatgttgaggaagaaataaaaataccagtagtgtgtgctttaactcaagaagaatcttcagcccagttatcaaatgaagaggtatagtgagtctataattaaagtcattaaatacacaatgtcaacaattttagcttactcatacatcagttaattacattgttcatatgagaagtgagaagtgcatagctacgaggtgaaagttagataaaaatgacagtattttcagttgtttttatggcattataggtagcactatttgaaacatgttgcagcttcattcgctgtctgaaatagatgttcttttttccagtatttccaaaatttaatacattagaataaacctttaaataatgtctgcaaaatcttttttgatgtgaatagtacatgttgctaatacttgtcttttttgtttaaaaagagattatctaaagcgctgaaatgcttaactccctgtagcatatatgagagtattaaccagtattaggttttcatccctgacggccatgggtgaggtttggcagataacaccacagggtaaaatgtttcaggtactaggaatgggtagagtagagagacctggaagtgttaggtgttctgtggccttgtcacctctcacctacagtgtggcaagggcctcctcattgggtttcctgcctcaacctgtcccattccactgcgtcctcagcattactgtcaaattcattttcttaagtgcagctgcagtcaggccactcccctactcaaaaactaccattgactcccattacctatataattaagcacacattcctcactctgacaattaaggcccttcatcatctggattacattttagccatgttggtcatcatcttgggctgtattcccacttggtctgttggttccttcatttggagtactttcctcccattgcctttctgagtattgaaatccttctactcatctttcaaagctcatcttgttatcagtgaaggaactgcttctcttattgcctttagaataaaaactaagatcccccaagatccctagcatggcatacaagggcattcacagttgaatggcccttccagcctcacttactgctctccacctctctgtagccagacctgtgcacttactgttcatgctcatgtggcctgtccctgcggcttagaatcacactcacttccctgcggcacctcctttcctggcctggtgaatgaattgcacttaaattggatacaggtcttgtctttactttcaggggtatcatgtttctatttactttgcagatttactttgagccatacataatctacatcctggtggttatatatatgcccatgcttacagattgtttgatgtttaagaaaaacttaaaaaaaattttagtagacactaaaaagtgctgtatattgaagttgttttgttcattctttgttctgggacatagactgggaaccacttggtctaattctgctgtgcattttaaaaatatttagactcccaagagaatgtctcaagttttgggtacagccaatgattacatagtgttttcatcatgcagtaatctatccaggaatgtttgaaaagtgggaaaacaggaaagggacatttgttgtgatttacagagaagtatttttatttttgattctctcttaacagatccgtagactttcagagctggtgttttgcagtttgaatgttgaatataattgttttgtattgagaataatgacacaactcttggtttagagttaatctgaagcctagctaacatggtgtgaaaccctatctctactaaaaatacacaaattagctgggcgaggtggtggatccctgtaatcccagctactcaggtgactgaggcatgagaattgtttgaacccgggaggtggaggttgcaatgagctgagattttgctactgcactccagcctggatgacagtgagatcctgtctcacacacacaaaagttaatctgagatgctttggagagttggatttatggctaaagatatttgaaatttgtagacctcacattttctttaacctgatgcttataatatgcttttctctctacaaaatgttcattatggaaaatttgggaagtatagaaaacaccattcaaaataaaaataactgatagatcatcctacccagaggtaacaactaatattttggtatgtatctctttcttcctttccttattttcttttccagagataatatatatgttaacatatgttaacatatttcttttttttttttttttaatttgagacagggtctcactctcacccaggctggagtgcagtggtgcaatcttggctcactgcagccttgacctcccgggctcaagcggtccttctgcctcatcctcctgagtagctgagactacaggcatccgccatcgtgcccagctaattttttgtagagacggtgtttcaacatgttgccccggctggaacacatgtgtttctatttgcacttttttttttaaatttgagacagggtctcactttcacccaggctggagtgcagtggcgtgatctcagctcattgcaacctctgcctcccaggttcaagcgattctcctgcctcagcctcctgagtagctgggattacaggcatgagccaccacgccaggctaatttttgtatttttagtagagatggggtttcaccatgttggccaggctggtcttgaactcctgatctcgtgatccacccacctcagcctcccaaagtgctgggattgcaggcttgagccaccatgcctggctctatttgcacttttaaaacataatctagattataactacatagtgttttgtgcaaattttttccccaacttaaatctactctaaggttttggcacatcattaaatgtttttccctgaaatgatatttagtggctgacagaatttcagcgtgtcaatgtaccataattcttttaaccaattccctactaattgatttgtgactttttttgtttttttgagacagtcttgctgtctcacccttgctggagtgctatggcgtgatcttggctcactgcagcctccacctcttgggttcaagcgattctcgtgcctcagcctcccgagtagctgggactacaggtgcacaccaccacgcccagctatttttgtatttttagtacagacaagtcttca[131 bp omitted]ctgagtgatgacatagggagttcaatgcccctgaaaaaagttttgtgttactcacagttctcctggaagcagaggtacagcacaccttgcatggccacagcagggaagcaccagaggtggtcaggaggcaggagcaggagcgagagaaaagcatgggccatagctattattgtggtttctttgggaaaagcaaagtggagcagagcagagggtttaggactggctggtaattaattccagcagcctttggggtatagggtctgttcttagctgtctggaactggccctgggttcatttagggcaggggaaatactggctcggtgtgtgacttaggtaagggaggtggttgggatatgggtttgggattgaatggtttgtgtgtgaaaggcatgtttacagttaggtgagttgtttattatctctagaaattagctagtcctgggaagcagtttcttcacagccagcaaggcctccagtaaatcaaaacattatgaaatacagaaaatgaaaagcgtgattaacacactgatagtcaagttggttccattttttactactatacaatttttcgttataagtaatgtcataatgttatatataatttttccttgtacaaaaatcattatggatgcatctgattttattttattttattttttagtgtgagttcttaggaaaagaactgcctggccgggcatggtggctcacaagtgtaatcgcagcacttttggaggctgagacaggcggatcattcgaggccaggagtttgagaccagcctggccaacatggcggaactcatccctactaaaaatacaaaaattagtcgtgcatggtgtctggcgcctgtcgtcccagctactcactgtggctgaggcatgagaatccctcgagctcaggagacggaggctgcaatgggctgagaatgcgccactgcactccagcctgagtgacagagcgagactgtctccaggaaaaaaaaaaaaagaactgctgaattcaaggatgtaaacatttttaagatattattgccaatgtagtagtctgatgtggggtcttttgttttgtgttttttgagacagggtctcgttcttgccacccaggctggctagagtacagtggcaccatcacagctcactacagccccgatctcctgggctcaagcaatcctcctgcctcagcctcctgagtagctgagactacaggcgtgtggtaccatgcctggctaatttttaaatttttttgtagaaaggagttctctctatgttgcccaggctggtcttgtactcctgggctcaacctatcctcccacctcagcctcccaaagtgttggatttacaggcgtgagctactgcgccaggcctgtagtctgatgttttctttttttttttttgagacggagtctcgctctgttgcccaggctggagtgcagtggtgtgatctcggctcactgcaagctccgcctcccgggttcacgccattctccttcctcagcctcccaagtagctgggactacaggcacctgccaccacgcctggctaattttttgtaatttttaatagagacggg[132 bp omitted]acaactgttctatccctagccccttccctcttcagtatcacagcagcactgtatatgatacatagcagtgggtgttagggttatttgtaaactaacagaatggcttatcccagtttttattaggatacttacttgggatctttgccatagtaagcttaatatatacgagatttgtgttcttagccattgcagtttcagatgagtaacaatctttaaaaggaaagaaatggaggcattaactcaaaatttgtcacctttttattacaccaagaatatttttaaaacattaaaaaaaataggttacatgagcttgccagtaacaacaactgtattccacagtctcctctggttcatttaaaacagggcgtttaacaacaaaacgtagaaaggatattatcttaaaacattgtcatttaaatggaataaatttagttggaaggaaaacttgttacatttttctttaaatcatttttcttatttcccactaactatgcaactgcttcatgtaatggcactggtttgctttttgccttcaggaatgtgctgtaccacgttgtttaaaaattgagataaaattcatgtaacataaaatttaaagtgtacaattcagtggcattgcatatatacacaaatgtttttagtttgaaaacatttttatcactcccaaaggagacctcataacccattagagtcactcgccattttccctttgccctagcctctagtaaccactaacttgctttatggctctatggatttacttgttctggacattttaaatagatggaattacataatatgtgactttttgcatctgctttcgcatagtatacaac[142 bp omitted]tggtgaaaccccatctctactaaaaatagaaaacattagccgggcgaggtggcgggcacctgtagtcccagctacttgggaggc[144 bp omitted]ctctggcttctcctttgctcatccccaagatgttaatctttctcagggttctgcccttggccctctttgcctacacactcatcctacgtgttctgatttgctgctgtgactttaattatcattatacgatagttactctcaagtctctatcgaaagacttctgtgtccctctgtcaagggaatatctctgcttggattcatgataggcacctcgcgcttgacacacgccacactgaattgcaggtgacgttcctcaactgttcgtatttgggagctctttgagctaccagagcattcagcacatagctccagcccatccttttatcacagtattataacagtctgcttacttatcttttttttttttgaagccgtatgtatctcgaggtcagggattatatcttgctcacagttgtatcctgagggcctggttttgtgtccagcatgtagaaatgacacttagtgtttgttcaatgagtctgtgaaggtagcacattaatgattatcatgtgtaatgagtggcggaatacatttattatagtttttgtctttaaaaacgcagagaattgtctaacttggccatatgtattttcacatttcaggagcatttagacagcacccgtggctcagttcattccttagatgcaggcttgctgttgccatctggagatcctttcagtaaatcggacaatgacatgtttaaagatggactcaggagagcacagtctacagacagcttgggaacctcgggctcattgcaatccaaagctttaggctataactacaaagcaaaatctgctggaaacctggacgagtcagattttggaccactggtaggagcagattcagtgtctgagaactttgatactgcatcccttgggtcactccagatgccaagtgggtttatgttaaccaaagatcaggaaagagcaatcaaggcgatgacaccagaacaagaagagacagcgtccctcctctccagcgttacccagggcatggagagtgcctatgtgtcccctagtggttatcgtttagttagtgaaacagaatggaatctcttgcagaaagaggtgagttacctttctcacgtttttcctcttgctcacgctgaggcacactgggaagctctgggatttagcgttcattcaacagacggttcctggagtcagtgcaggcacatgttgccagcaagtggatattaacgtgtgtcacctgacccttgtcatagtctgccttgggtattccaggtaattgtgacagagaaaggagctagctagttaatcacagtgaatgtgaacctccccacctgaactcacagctctcaggttggagcaatctgcctgactagcattgcggaatttaagttagagcaacctggatttggtttgctttgcagttttctataatctcagtgtattgcaggatccaggctttcatctttcctttagatcaaaagcgcaattgccggtctgctgttgatgctgagagtgggtttaaagaggggttgggaatatgggagagaaaagaaaccaatctttaatgaagttgattttcctccttagagaatttgtaaattcacaggtaagattaggagataaacacttcgatatttgcctaatgctttatagattacaaaggcctttcacatacctgatctctttaagctttatcattataatgaggcaagtggggcatggttatctcccatttacaggtgagaaaactggctgggaaagataaagtgagttgctcaagtgttccctttgacttagtcgcaaaacctgactcctggtgctttccttgactgagggctgcttccctttaaggaagccaccggtcagtaagtggaacagcttactgaggcctgaaagaaactattctcattggtcttatgtaacacatacgtgagaaggtgctatttactagtttggtacctattttataattggagctggtgaaacggtgacttggcactgtttttatttgtctttccttccctttggttgtttagtattataccatgagtgccatgggatagtaccttttgcttgctttgtgttttcctcacatgtgatgttttgtgcctcttggcgataaattgtgtcccatgtgtcctatcatacttgtactggagagtttgattttttagaatctgaccctatattgtaactttttgccgtaaggccctgaagaaagtgtttactgcatgttctactgactaccattggtaagactatgcacgtgtacctcaagtgtgtgatgtagaattgttttgcctgataagaggtaattttggtgcccttcaggtacataatgctggaaataaacttggtagacgttgtgatatgtgttccaattacgaaaaacagttacaaggaattcagattcaggaggctgaaacgagagaccaggtgagtttcttctggatgcgccaaattggatattgtcgttttcattggaggtgcagaattaattgcccccctctccggccccagccccatttacattatgaagcatatccatcttgttaagttatgaaataacctggtacatgcaatggcagttacatttccagtgggagctcactaggactctgctttttttttttttgtttttgtttttgtttgttttttttgagagggggtctcgctctattgccaggctggagtgcaggggggatctcagctcactgcaacttccgaccccctggttcaagtgattcttctccctcagcctgccgagtagctgggattacagggacacgccaccacccccagctattttttgtatttttagtagagatggggtttcaccatgttgcctaggatggtctcaaactcctgacttcatgatccacctgcctcagcctcccaaagtgttgggattacaggtgtgagccaccgcgctcggccaggactctgtttttgtatatctgcacaggtctgcccaactcttaaagggacactacctaatctcttccaccctgccccttccgcctaaggcctaaaagtgattttaagtacatggcaagtactttatgatatggagatctcagggagataaaaggttgattgttgcctccagtagaataaaggcttaatggaatgttatattaatcagaatttgtgtccttcagtgcatattactcatttcttgtcataaatttgttgaattaaggttaataagttcccagaaattaagctttggtagatttggtatgctgagattgataaatcttcagtactttttcaagtgcagtgtttaataatgggcaccttgatagcagttaggaaataatgtagaaattcatgagagtgggcttgtcaaagtctacgtaagaaagatacttttccctcatatttccaaattgttctttggttgttatgaagattgttcccttagccttcaaaataacttcaagccaattagaatgatggtttaatattttcaaatgtcattgctattgagttccttcatacactgtgtgctttacgcatagatgtttcaaaggtaaatttctaaatgtatttgcaaaactaatgtagttggcccctgatagtgtggtgtaggaatggttttcataaacatttcagtagactgttttaaagcctggctaaaaattagtcagaaaaagaagtgggaaaagggtgttcatggagagaaaaaatatacaaagaacagagttaggaaagaaaatgatgtattgtaggaagtatgagtagttatgtggctgggcacagggggtgactgttacgaaataatgggaatgtaagctacaagggaaagccatgaagacatcacttagggaggggtgatgat[131 bp omitted]aaccccacctctactaaaaatgcaaaattagccaggtgtggtggtgcatgcctgtaatcccagctactcgggaggctgaggcaggagaatcccttgaaccccaggaggtggaggttgcagtgagccgagattgcagagcgagagactcttgtctcaaaaaaaaaaaaaaaaaaatttaccctgaagactttgagaggcatttagagttttaagtagggaaattatattatttcacttttataaaatttctggtgttagtgtggattgtagactggagacagaggatacactctagttagggagaacagtgtcatggtctagaggatctgagggagaagcagatgttttcagatgagatgtgtgtgaaaaatgatttgttaactgtaaaccacagtacagttgtctcttgaggtcatttatctaatttctgtctgaattagaaaatctgtggtgtttcccagaaaaagacataagagatttttttttaaaattctggagttagatttaaaaaaaaaaaaattataaaaggattctggtttttctaattgacttttaaaatgatacaggtgaaaaaactacagctgatgctaaggcaagctaatgaccagttagagaagacaatgaaagataagcaggagctggaagacttcataaagcaaagcagcgaagattcgagtcaccaggtaagggagggtttatagactgtggcccatgagggatgactgggttatttaaatgaaagattcaaaaaatatagtcatgtttttttttgccttgaagatttggcagttttattttccctcaggtaaaaagatttcttactgatcattctgtgatctctgttttacagatttttaaagaataactttcaaaataattggtcagtaaatgccaggaggttctgattctcctttcctttatttgtattagttaggttttcctgctgcactggaaacttgctgacaaagatactaattattttcttttaaactttttaaaagtatagcaacatgaaagaaaaaaaaaacatatacagatacaccaaacataccagaaccaacatctgtgtaaccaccattgagatcaagcaatagaatattagctggtaccccagaagccctcactttccccgcacttacaactccctcccgacaggcagccactgtcctaacttgtaacaccattagattagcctgtgctttaactttagaaaatgaagccatacgttctgtgttcttttgcgtctgtgttcctccgttcaacagtgtactattcctactcgtgatgcacggagtgtttgttcattttcattgttgaatagtcatatcattatacggatataccgcaatttatccagactaatgttgatggatatttcagttgtttccagttctgggatattatgaataatgttcctttgaaatttttgtatagggcgtggtggacatgtttctgcaggatatgtaactaggggtggaatgcttgggtacaaatgttcaaaatgccaaataattttccagagtggttataccagtttatacctccaccagcaatgtatgagagttcctgtggttccaaggtgtggaaaaatgtcattttgttattttaattatagccatttcggtggatgtataatggtatttcactgtggcttagtttgcatttctctaatgaccactgaagttacttagcatttttcatgtttcttggccattgggattttctgtgtgtgagagattcctgctcaagtcttatcctcatctttttattgggtggtctgtttattttactttttttggtctttaaaaactgatttgttaggtgtcctttatataatgttagaatcttttggtgataggtgttgcaggtgtcttttactcagtagcttatattttttgttttgtttttgagatggaatcttgctctgtcacccagtctggagtgcagtggtgcaacttcggctctctgcaacctctgtttcccgggttcaagcagttttcctgcctcagcctcctgagtagctgggattacaggcacttaccaccacacctggctaatttttgtagttttagtagagatggggtttcacgttgttggccaggctggtcctgaactcctgacctcaggtgatccacttgcctcggcctcccaaagtgctaggtgtgagccatgcacctggcccatcagtagcttatgtcttcattaatggtgtcttttaatgaa[135 bp omitted]accctgtctctactaaaaatacaaaattagccgagtgtttcggcgcattcctgtaatcccagccacttgggaggctgaggcaggagaatcgcttgaacccgggaggcggaggttgcagtgagccaaggtcatgccattgcactcccgcctgggcaacaagagtgaaactccgtctgaaagaaaaaaaaaaatcaaatttattaattatttctttatggtttgtgattttcctcctttttaaaaaggaatcttttcctatggagttatgaagatatcctatattatagaggttttattcacatttatatctaaaattcctctagaacttagatacacacacacacacacacacacacacagtgtagataagggtaaaacttttttgtctcgctgtgtcgcccaggctagagtgcagtggcacgatcttggctcactgcaacgtctgcctcccaggttcaagcgattctcctgcctcagcctcctgagtagctgggactacaggcacccgccaccacgcccggctaattttttatttttagtagagacggggtttcaccatcttggccaggctggtctcgaactcctgactttgtgatccatccgcctcggcctcccaaagtgctaggattacaggcgtgagtcaccgtgcccagccaagggtaaaacttttttttaaaaaaagtatggatagccaatttctgtatgacttggtgaaaagatccacctttcccccattgctctgtgtagattagtttcagaactatcttctgttcagttggtctgtttgccttttttttgtgctaaattctgcactgtgatttatgtgaaataaaattttctctcttttttttttaaacccgagatggagttttgctcttgttgcccaggctagagtacagggtgcgttctgggctcactgcaacctctgcctcccggttttcaagcaattctcctgcctcagcctcccgagtagctggaatacaggtgcccgccaccacacccagctaatttttttttacttttagtagagatggggttttaccatgcaggccaggctggtctcgaactcctgacctcaggtgatctgcccgcctcagcctcccaaagtgctgggattacaggcataagccactgcacccagcctgattttttttttaaacatctttaaacatagctacaactaggtcacgtgagttactgtctgcctagaaacccatagaatgctctttgttaatgtatggctgcatgtgactcgggttttggcactgccttgtgttatctgaaaggccaaggctttgcacatagcagatgtgcatgcagctgttggatgatggtcagtggttcccatgaacaaataaaatgtcaattccagacactaaatagttagaagatggaagagttagtttcagaataaccgatttcctaactatgtttctatacatgtgtttttttaaagatctctgcactcgtcctaagagcccaggcctccgagatcttacttgaagagttacagcaggggctttcccaggcaaagagggatgttcaggaacagatggtaagtttacattttaagtaaatgacaactatgttactatatattccttttttgttctatcttgacatcatctttgataggaatttatcatcctgtccaaagtagttactgttgtcttctcccgggactgtagaacattaataatggacaaaatattgtaaagacattattccttttttaaacctactttctggccaaacaaaaattttttctcatcgtttaacttatttttctgatttgggaaacctaaacagaataaactatggacctaatttaatttttaattccaaataaaagctaaaaaattgaatgtctgagagccctagctggtacagcttttgaccagtcattttgtgattttcctggatggctaatttatttagaataaccttattagggctgggctgaggcgggtggatcacgaggtcaggagattgagaccatcctgtctaacatggtgaaaccccatctgtactaaaaatacaaaaaactagccgggcgtggtggtgtgcacctgcaaatcccagctactcgggaggctgaggcaggagaagcgcttgaacctgggaggctgaagttgcagtgagctgagatcgcgccactgcactccagcctgggtgacacagcaagactctctttcaaaagaaaaaaaaaataaccttattagtttcacaggggttatgaaaaaaaacatgtaactgttgtggtgctggggaccttccagaaggccatctatgctgagagggatgggggcagagtgttatgagcaagtgccggctagagcctttgcagatagtccccaggcttgggctccctcctcactagtctggctgcatttgctttgtttttcctttctcaaagttggagcctacatctgatgcctccaactaaattaaagtagaggtggctctgctggggtgattctacaaggctgatgcttacccggggatgacagtttaaaaataaaagccttgggtggaatggtcattgaatgtttttaattggcattattaggtcagtatctgaatggcctatgagctgatccctaaatcttaaacctggtctgttgggaagcatctcatcctaatcattgacccatagtttcatgtgttttctctaattagaaaatacaatataacactggcgtaaaaatcactgctaaatactgacagtttcatagcggtgagcctcctacactccttcgaccccttgcatctttttccttcttgtctttttttttttcttttttgagacagagttctgcttttgttgcctaggctggagtgtaatggcgcaatctcggctcactgcaacctcctcctcctgggttcaagtgattctcctgcctcagcctcctgagtagctgggattacaggcatgcaccaccacacccggctaattttgtatttttagtagagacggggtttctccatgttggtcgggctggtctcgaactcctacctcaggtgatccacccgcgttggcctcccaaagtgctgggattacaggcatgagccactgtgcccggcctccttcttgtctcttaaaaccatcagcccttgcagacacttttcaagctggtttcacttaaaatgaatgtgtgtcagtgacactggagaactgttgaaattaaggttgaggtcctatgaactccagtacatgaccattttgttgaaattaccataaagaagagaaactcaccacgttagtgcatgcttgcccttgttcttagtctttctgtgtatgtttgtaggtatatgatgtgtgtgtgtacgtatgtcttggtttgtgttttttgctggactgtttggagttattgtagacatgacagtcgtaagtattttagtatgtatttcctaaaacaaagagttgttctgcatcgctacagtactgttattacatccttaaaatttaaccagttgtcccagtaagtccttgattactttttagtggtggttttcctttttatattttctatattttgatccaggaaccaatcagtgatcacatatttcatcttgttgccatgtcgctttagtcacttttcatctagaacagtctcccactctctttttatttttaagaatccggccaattgctttgtttcaggccatctgtcttgtagaattcatttgtctgattatctccttgtgatttgattcaggttagacatcttggcaagaatactgcacagatgaaatggttcaatgggaggttcataacataatgaggcacgttaatgatgggtgcttccattactggggatgttaaatttgatcactcggttaaggtggggacaaaatagtttcagaatgactatatcaatattactaccaacagcaaatctactaagtaaaggccaacatttctttgtagttctgcccttagactgtatctcagataagggtttacagtttaagtactgtgttcaaatgttagtttttctctctgtggttgtattaggaatttgatatatagttagctccatttgtttctctttttttttttttgtttttgagacggagtcttgctctgtcgcccaggttggagtgcagtggcgcgatctcggctcactgcaagctccgcctcccgggctcacgccattctcctgcctcagcctctggagtagctgggactacatgcgcccgccac[184 bp omitted]ttcttgatttatattttgaatatgtaacatggttcataatcaaaagtataaaaataaatactcagctccatttccattccctgtccttttcaccccatttccactcactcttatacgtaattattttaatttatttttggcttatccttctgtttttctctttacaaaaacaagcaaatatatacatattcttttttcccttctttcatatccagaaggtggtgggatactaagattttgttgtaaatgggtgacagtgatcataaagcacagtggattctagtctgaagacaataagagccagtgggctttagccagagcatatgcatggccgtgactgcctgtcttaggcctgtttgtccttcagaatgcagctcagtcatcgcctcctctgggaagtgttctttaaccctcttcccaatttcctgccccaaattaggtacccctttgtccttttatcactgcagtacccaatctctgtcatagcagtttatggtattgtagagtagtttttggtttacttgtctttctcctctattggaccatgagcttctccagggcaaagtctttgtcttttatctctgtatttcctgtgggcagcaaaacacgtggcatagagtagtagctgcacaataaacatcgtatgagagcatcatctacatgtatgtgtgcccttaaggtaagtgactttagtactacagattagcaggagtcacgtgcttttgtagagctttatctgatactcggatttggtggataacttttatattgatacaaataatatgaaatacctaaaattgttttacacatcaacaagcagaagtgggagtgtgtcccattttaagaataagcttctctggctgggtgcggtggctcacgcctgtaatcccagtactttgggaggctgaggtgggcggatcacgaggtcaggagattgagaccagcctggccaacatagtgaaaccctgcctctactaaaaatacaaaaaaatgagctgggcgtggtggtgcgtgcctgtagtcccagctacttgggaggctgaggcaggagaatcacttgaaccgggactcgggaggtggaggttgcagtgagccgagatcacaccactgcattccagcctgggctacagagcgagactgtctcaaaagaaaaaaaagaataagcttctcaagtgctctgtgattcctgagcttagatgctcttgatgacttccagtatctgggcctgctgggccattcacagtgattccgagcctaaacagaggtatacataataggaaatgaagacactactctgtttctccctcctttctgtccagtgcacgccatggggaaatgggagttgtcttagagtacatgctctgtctgatataggtcttgatggtgtcagccacttccattgaactagagatcctggtccttctgtagtacagggatatggagggaaaatattaatttttttttttttttgagatggagtcttgctctgtggcccaggatgggcgcaacggtgcaatctcggctcactgcaacctccgcctcctgggttcaagcgattctccggcctcagcctccctccctagttgctgggattacaggcaccccgctgtacccagctaactttctgcattttagtagagacagggtttcactgttttgcccaggctggtctcaaactcctgagctcaggcaatccacccacctcagcctcccaaagtgttgggattacaggcgtgagccaccacacccaaccaaaagatagaatttttaagcggtttgtagaaacagtggagaatgagcctcagatacttgcttcattgcctgtcccttgttgaatatatgctgtaaaccagaaaatctctgtgcagctttttctaagtctagcagaacttcaccataccccgtccatcctcagcactcctttagtttggacttgtttttctctggtgtagctatcaccagaccggatctacctttctggctgtgattagtatctacttctattttaggcggtgctgatgcagtcacgggaacaggtttcagaagagctggtgaggttacagaaagataatgacagtctccagggaaagcacagcctgcatgtgtcattacagcaagcagaagacttcatcctcccagacactacagaggtaacttactttccacatgatcaaaaatgtcaacaagtacgttttctgaaatggccgtatgttctttatgtaaacagttttattcagatataattcacgtgccaattcaaccatttaaaatgtaccattcagtggtttttgctgtactcacagatgtgtgcaaccatcatcacaatcaattttagaacattttcatcacctcaagtagtaactccctgtgacccgactacaccagctaaacacacacacacacacacacacacacacacacacacacacacacgaaaaagtaacacttcgccctttagctaccatccttattccccctcctcccctagccttaagcaactactaacctttctgcctctatagatttccctattctggactttcctatgaatagaatcatacgatatgtggtcttttgtgtccatgttctttcacgtagccttaatgttttgaagatctatgttatttttgtcggcccagattgagagtgtgccagaaattaaatgtttgaaggggttaccatgctggctgcttatgacgtttgtttttgtatctagtacttgaaaagttataacacactcaccatcatgctgtccataaagatgacacttttgtttctttttgagacagataatatctgtcacccaggctggagtgcaatggcatcatctctgctcactgcaacctccgcctcacaggtttaaacgattctcctgcctcagcctccccagtagctgggattacaagcgcctgccaccatgcccagctaattttttgcatttatagtatagatggggtttcaccatgtttgccaggctggtcttgagctcctgacctcacgtgagccaccatgcccagccaaagatggcacttttggtcacttacattcttctgtggttgggtaaacctgggctacaaaactggtttcccagagacattcataattctctccttaactttatccaagcttaatttttaatttttattttttgagacacagtttcattctgtcccctaggctggagtgcagtggtgtgatcttggctcactgcaacctccgcctcctgggttcaagtgattctcctgcctcagcctcccgagtagctgggattacaggcgtgcgccagcacgctgggctaatttgtttctgtatttttattttttttattattttttattttatttttattttttgagatggagtcttgctctgtcacccaggctggagtgcagtggcgcaacctaggcttactgcaacctctgtctcccaggttcaagtgattctcctgcctcagcttcctgagtactgggacaacaggcgcgtgccactgtgcctggcaaattttttaaaatattttttagtagagatggggtttcaccacattggctaggctggtctccaactcctgacctcgtgatccgcccgccttggcctcccaaagtgcggggattacaggcatcagccaccgcacctggcctttttttgtatttttagtagagatgcggtttcgccatgttggccaggctggtctcgaactcctgatctcaggtgattagcctgcttcggcctcccaaagtgctgggattgcaggcatgagacaccgtgcctgtcctatccaatctttatacctgtttctttttttttttttttttcctttttaaggaaatcttagtaagtagaagtttcccctaattataccctacagattcaatctctataatttggacctcattcttttttcctatatatgtattaacatgactgttattttttatgtttatttcatcatttacaaaaaaccagttgcctatcttgccattagctctttgctgtctcccacctttccccaacttcttatcgtctcagctcatgttacaggcactcttggcagagccttctttcctttctgaattggtgactgctgtcatcaaaagaaggtatcgggggcagggtatggtggctgaggcctgcaatcctagcactttgggaggccaaggcaggcagattgcttgaggtcaggagttcaacaccagcctggacaacatggcaaaaccccgatgctactgaaacaaacaaaaaaaattagccaaggatggtggcacacacttgtagtagtcccagctacaactacttgggaggctgaggtgggaggggtcgcctgagcccaggaggtcaaagctgcagtgagctgagatcgcgccactgccctccagcctgggagacagagtgaggaccctgtctcaattaaaaaaaaaaaggttttgggaacctgtctacttttgctatcagcttaaaatcactgtttaccaccttccacctgttagatttttctcttttgtcaggaaagaatcctgtcttccatgttctttagagactttattcctagattttatttcattttatttatttatttatttatttattttgagacagagtcttgctctgtcacccaggctggagtgcagtggtgtaatctcagcttattgcaacctccgccttctgggttcaagcaattctcctgcctctgcctcctgagtagctgggactacaggtgtgtgccaccatgtctggctaccatgttggccaggctggtctcgaattctcgacctcaaggaatccgccttcctcggcttcccaaaagtgctgggattacaggctttagccaccgcgcctgcctagtcctagatcttaaaatgttccaagaatccaggccgggcacagtggcacttgcctgtaatcccagcacattgggaggttgaagtgggagttttgcttgagcccaggagtttgagtctgtggtgagatatgattatgccattgcactccatactccagtctgggtgacagaggaagatcctgtctcaagaaaaagaaaaaaaaagttccaagaatccttgaagaatgtagtcagtgtgtaatccttgattcttggacctgcttcagcaataaatcttaggaaattttaaaaactgttgttttatatatattgttatttgagaatctcgtttttactttagagttgctttaggatataattggaaggatttctaaaagaagacagaactaaaatttaggaagaaaaataaattctatactgaatttattacagaaaaacagcttaccaccttagaaagccacctttgccattatttacctctggcctaaggtagtactttgcctctggtagatgtttagtaaatgtttgaatgaatgaataagtgagtaagtaaataaatgttatcctcttagttcacacttgctactgagtgtgaacttgctactcagttttgtcttcatttcctaactcctcccaaatttctgcaagtaatagtagaggattctaaggtattatttctattgaatggcatattgtaagtcacttaatctttttatttttctgcttatgaaacagttttgagggaagagtatgtggcttacaagatacgacttggccagaaatgtcttttctataacatactgaatgttaacctgacatggcacctgccctgaagctctaagtggcttaatggtcaaagtcttaatttttgaaccattaaaacaacatctgagattctggttacagaaaatctttagcttctttatttcctttcactctcacaaacccaataatcatttgtttcttgaatccaggcactgcgggagttggtattaaaataccgtgaggacatcattaatgtgcggacagcagcagaccacgtagaagaaaagctgaaggctgagatacttttcctaaaagagcagatccaagcagaacagtgtttaaaagaaaatcttgaagaaactctgcaactagaaatagaaaactgcaaggaggaaataggtgaagataaaagtgatgtagtttagaattagagtcactaaataaaactttagtaaaagaagcaatacatggccatggagtctggaacacagaaaagcttaggaaagaatttagtaaggactcagtccattttttgtagatattctgatatattcagattctgaatatatattctgatatagtcaaataatcagaaattctggttatttaaaaaatttttttttttttttttttttttgagacggagtttcattcttgttgcccaggctggagtgcaatggcgcgatcttggctcaccgcaacctctgcctcccaggttcaggcaattctgctgcctcagcctcccgagtagctgggattacaggcatgtgtgccagcacacccagctaattttgtatttttagtagagacgggtttctccatgttggtcaagctggtctcgaactcctgacctcaggtgatctgcctgcctcggccttgcaaatgctgggattacagttgtaagccaacgcgcctggccgaaaactcgtctttttaggagttctgtggcctctttggcaattattcatagataggattctcagtacttgaacccagaaccaggggaacgtgattcaatgggtggcatttccctgcagagatgtgatacatgatctagaggtagtttatgacacagtgtccatttgcatggatcctgcttttccctgagcctaaatatgctgattgcttggtggtaattttgagacagcccccggaacccatgttcagcatacatttgaatcctttggggggtgctctaaaattttaaagaaaaaaatgttcatgcacaataatagatgaatgctaatacatctcatttttttccttctagcttctatttctagcctaaaagctgaattagaaagaataaaagtggaaaaaggacaggtaagtcgtgagtttcaaattaattctatcagcaaccagtggttatttactgactcctactatgctgcacccaacgaataaaaaatagttaaggcatgggccctgccttaaggaacttttgtcttgtgggaagaaaaccacggggtaagggtgtgctggtgatttattgagagtgccctgtgtgtcaggctacgttaaactggaggaggtaaggctaagatgtgactgtggcctggagtttccagtgtagtgagaagataggcaaggcatggtcataacatgttatatgcttagaggtacagtagaaatatgtataaaaaacattacaaacaagagatgacattttctagctggcttagtcctcttagacatcattagttcctttcatagtaaccccattcaacttcctgacctcactgttccttgatttagagattttcacctccaccctgctctccccttccacacactgggctgcattttgcccaactgtgacatctcactgcagccttaagttccttgaccacaatctgccatccttccagctcttccatcggagtacctcattcagacctccagttctctgaacttcccctttcattctggtttcagcagcttcatggcttgctttctttcccctaggttgcatcttactggcctgcctcttcccttcatctcccaccacacctgtccctatggtctttgactccttgtcctgctgctgccctcacctgaccactgcccaaccttggactagtcttgctgtccccagctgctgatgccacgagacttggtgacactgcatgctcaagctgccagatgggcctccagtgttcctcatgcagcctttcatgtgtcctaagttgcgtctcttccattcctcacagtggcagtttcagagtcacctcacctcagccccctcactctcagcagatgctggcctcactcctcaggcatcaggcagggccaccttcagctactgggctcctcaattacaggttttccttttattcccagtcttttctttttcttcagagaatatcatgacctgcttctgaccacagtgtcattgcataggtgctttgactgagtatctccgacttttccagatgtccccgcgcagtgccgggccttgaacttctgcctcttgactgatcttttccattatgcatgaacaggctcaggtgtctcatattcagaaggaaaaagtctgtctttggattgcactcctctcccgagctaccactctttcttcctccctctgttgccacagtcttgatcatcatcactgcctgacttcccaggcatccctccacctgctgcagtctgcctcctgcctccactttgctactgatattgcaccagcagaaattaccagcgctcgaaataacatctcatcctttccattctagctgccactctttgagttcagacttcactctcacctggcttattgtaacagcctaactttccctgcctccaaaatttgtccctaaatcatctccatattgaaatcaaggtgatatttaaacattagaaacttgttcgcgtcccagtctagtggaaagccctcccgtagttccctttattttacaggatcaagtccatatccttagcccagccagagctctcctgcctcacacctctctgcctcagtgcctgtggctcccaacgtgctgtgctgtaggccagccgaacatgccactgttgctgcatgtgtttttagtgcgtgccatccattccctcttattggagtatctctccatcttctccccttgtcacccttgtctttgccctgtaaaaatgtaggagtcaaatgtcatctcctctaggaagtcctttgtaacttttctggcagaattaaatgcttctttcttcatcctttacatgtctgtttaccctgatttctccattttgaggccttagaatatagtaggcacctaataatggttaatgaaagaatagttcaggaagaatacagaggggatccacagagctgaaagggtgagaggagtattcccagtgtagcccgagtgtcttggtgtaattctccaggctctaggctcttttaggtagtgcactggggcccagagggagtttctgtgagtttcagctttttcctttttcacagttggagtccacattaagagagaagtctcaacagcttgagagtcttcaggaaataaagatcagtttggaagagcagttaaagaaagagactgctgctaaggtagtgttttcattagtcatttaattttaaaaagcagggctaagaatgcaggatcacatcttgcttgttgaaaaaaaaatattggtgctttgaagtgtcaccttttaaaaagttggcaaaactgacagcttgtgaaaagaaaaaacttaaacgaattgatctattccagctgggttaaatcttttctgccaggtctggaggcctgcgtcataggctagcttcagatagtaggcagtcagggccattgaccaagcctgggcactgcccagttagaagcactgctttgaaaatgtcattccatttgactgatgtatcaaatcctaagagagattgcatcaaaccaggtttgctgcctaaattttgatgagttccgttagaataaacgtgcatgttgtgggggtagtttcctagaaatggtcttagtgagctgagtggtcagacctgaaagtgcagacagtgttgctgaactgcttgtttttggaaaggctcccacacatcctgctggttttctgtaagagagactggggatagctggggcgtattcactaagtttcctggtggatgcttgactgtggaggttgtcagaggaagtcctgtatgtatccctgttggtgtgacagacaccgatcttagcagctgttttggtgattatcgtcactgtcaccagctgctgggggtgggggagggcagcactttaatccatttcttcctttggcttttcatacccagttcatctcaggacttagagcaagtagtctagatggcctgcacgcttgccctatagataaagagattggtcgtgtataggagtgcgacggatatccacccacctttctgccctagtagtaggtaactacaagttactggatttcctaagtaattcggccctttggcattaatcttcattcaaaacttgtattttttaggctaccgttgaacaactaatgtttgaagagaagaataaagctcagagattacagacagaattagatgtcagtgagcaagtccagagggattttgtaaagctttcacagacccttcaggtgaggcatttggggaaccacatacagagcacgaaggcagttttgggggacagaaccttgccgatccctgacttgaccactggcagtagctagaggtttagagactggctgctcctacctccaccccaaatgtctgactcatcattcaagccagaaacctggtgtgttcttcacacttggcccatttttctttttctgtatgccttgccaattttgcctccttatgagtaaagtactgactccttagcataccatgtaagactcttcccaaccaggcccacccctgtattttgctcatctctctgccttgttttacatgtttaactgcttgtggttcctcgcccacagcgtggtgttctgtctggtaagcatcctcatctcatcccctcctgactcctttctttcaaggctcagcgtaggtctgtcccctctgtggagctcttctaggtccctgagctgggctaaagtgcccctccctctgccatgctccctcgggcactctatgaatgcctgtaatgacacaatgacatttagaatattgtgctaaaactaagtttttttcccaatggaacttcggatttttttttttttttggagacggagtcatgctctgttgcccaggctagagtgcagtggtgtgatcttggctcactgcagcctgtgcctcctggattccagcgattctcctgcctcatcctcctgggtagctgggattacaagtacacaccaccaagcccagctaatttttgtatttttagtagagacagggtttcaccatgttggtcaggctggtctcaaactcctgacctcaggtgatccacctgcctcagcctcccaaattgctgggattacaggcgtgagccaccgtgcccggactggaactgtggattcttcaggattgggagtcaggtctcatttgtctccataatcccaacacattacactttaaaatcctagtctgggccaggcatggtggctcacgcctataatcccagcagtatgggaggctgacatggatggattacctgaggtcaggagtttgagaccagattgaccaacaatatggtgaaaccccgtctctacttaaaatacaaaaattagccgggcatggtggcgtgtgcttataatcccagctacttgggaggctgagacaggagaattgcttgaacccgggaagtggaggttgcagtgagccaagatcatgccactgcactccagcctgggtgacggagcaatactccatctggaggaaaagaaaaagcaagcaagccaggtgtgatggcaggcacctgtaatctcagctactcgggaggctgagacaggagaatcacttgaacccgggaggtggagactacagtgagccgagatcacaccattgcactctggcctgggctggcctggatgatgagcaaaactctcccccccaaaaaaaaatcccagtccgttacacggtagctttggggaattatttttaaaatttttaattgttcttgctgtctccctttgaagtgactagtactctggtgagttaatctgctacatctcagctaaaccagtcaaagttcagaaaatctaggcaggagccacctgtagttatctcaccattgtttctccaggtgcagttagagcggatccggcaagctgactccttggagagaatccgggcaattctgaatgatactaaactgacagacattaaccagcttcctgagacatgacaccctcatggcaggattctagcctgcactttgggtttttaactcatctttagagcaacagtaattattatttaactcttaactgaagaaagagaagtcacaacaaaaggaagactggagaaatgcttacttctagagggagaagactgtgcggcacaggaaacagcaaacagtggggtgatctgcagcccagagaccttcaaatgcgaacactataaactccaggcttgattccaacaggcgtgggatcagatttggtgatggaaaaagcgctgtttccttgcctgctttctccaagacagattttcggaacacatttccctaccctaaagcgacatcccagtagtgtttggaattttctgttcatagatattggaagagagaatttgctttatctgttgtctagagctcatcagtaacagtattcagttagcagacagaagtgtagtatgctgtatgaatattttatattaaaatatgaaggtttgagagcaggccattggctactgactgtattttgttttccttttaccattttatcttatcttgctttggaggaccttaaatgctactgaaacttacctgagaaccataggactgtggcaaacaaaaccaattcatgaagtgaattaatgatgaggatctgaaaacttggctggggctatatatactggaagttgaaggttaaaggaaaagcacaagaaactttggaagcactttttctgcatacttagatgatcttcatgggcccacagggtaccaggataaagccgaactggtaccatctactcttttgaagtgttttagtctagttattggatcagtgaaaaacattagtatacgtttttaaataggctaatttttcaacttggatcattaggcttacgtactacttgtttcaaatgtgtcaaatacaaaaatggtaactaggttgacagatactttgtatttttcttttgaattcagacctggaatgtaagtaagtgacaatgcttatggaaagccagttagttagaattggaaatctgtcttgtcattttacaagcattagattcctttcctgtgtgaagaaagcctcagtgaaacaggtctttgccataactttatgaagtgctacagaaagcacaaagaattgattcatgttcatcaatacctgctgagagtactgtcccaggaatatccagtggatggattcatcatccaggaggttcaaaagtaagatggttttcaaatcatttttgagactggttgcataacagcagggtacctgaaagagccttctgggagttagtgaactaggtagattgttttgttcacataacgccaccatcaacttaaagtgaattgtctttgttataaatgaggtcactatggacttaccctaaagatcttctgtacttctgtcttccataggacaaatgataagtactacatacctcatctcttgggttattattgtagtcttgcattcatggttatgaatttaaaaataaataccaattatggaaatagtactaaaggcttgccgcacatgaaacattattttaattggtttaaagtccctttataaagagtgctacatggtttagataaaggaaacatataactattgagttacaggggattttattaattataaaatgcaatcaatttaaattacgtaggtttaagactagtcccttggataagccccaagcgaatttgtcttcagattattaaaattagtgctgtaaatcagggtgggcaattcacagcctttctgaactgactgaactagagcttgcagtgaagtgttctgctgagactgagcaccttacagatatttttctccagaagatggtgctgggtaataaaatcatcacaattagggaatggttagtggtctctactgtggcaaatgccaactgttggaattcactttattgtagaaaaacccaaactgagactcttaagttttgtttagcaatgtgtttctggtatgaaacaaactactgtgtcactgtccaggtaggaaacaattctttcaactgggttttcagcataaatgggaactgatgtagaaggcaggatttagcccttctaggcaaaagaaaagctcagttgggtttcacgagtgttcctgtgcttatattcagtctgtgcctacatgttctcatgcatgtctaacctgatttacctcttacctgtaacctaccttatcatgtggcttttaattgacagtcactcagccatttctaagcagatatagtagtacctttcagaactcacattggcaagtgtaaaaagatgacttaaggtgaagtgaggacaaaatcacattctgcatactaacctatttttttctccctttaaggtgctaaacttgcacctcatgtccactcagtaacaagtattgggacgtagagcacagcctcactcagctctgaaaggtaatacagcttgtgaggaagtgagccagcagtggcctttgcaattgtggatcttgagctctgctctcagcagatttcaggtgtaaccatttgttaactgtactgaaggtgtgtcctcaagaagaaagtgttcaaattaaaaaagctgctgccaagtacactgtgtggtcttctcctttgaatcctagggttctatccctcttcagagtcatgtttctggtgctgctactttaaaacacagctcacaagaataactaacttgctcaaatatggagaaaactcaatagggttcagggaggttctggcagtgtgcagtgtgaaataatcctgagtccttgctgaacacaactgtaggcttgagttataaagcacattccaaattttaaataaaagcatttactcaattattataaaacaacatatttaaaaagatgaaccacaccaaaggtcatcaaaacacctttttataaattagataattctacctgttttacaatatgggtttaagccttcaatggtgttcagttcaggtgtgagtcagctcctggtggtgtcagaagtttacatgattgcggatatcattgatttgcttcaccatttcccttatatgttcacccctgtaaaattgtaaagtcactcacttttggaattataataaaccatttatatggattcttaagaatttaaactggtaatgttgaaacatctaagaactgctttgctaaaattaacagctgaaggtttcaggtggatagcaatagtgttcactattcatttaaggtggcaaacggtgcaagtactggaaatatttttgaacataattactgtaaaatacctttggccacacaacaaaatcatgttactagaaggtcatccctttcaatcctcccaccatagtcatttcttaagtccctatgtatcatgtggctctcatcccagtaattacttgacatgcaaataccaagattcaggtttctattaagacaggttgattctggcatactgtaaaggaaaaactatctcacgataatagctgattggaagtatttacttactcctctttcaggatggactgaatgcactttcgctggtaggcactgagaataatggtgggttttggaagactcaacaccttctccatcttttgctgttgataatcctttttcatagtaaccttaagtattaaaataatagatattttggcagtggtttgccacacattttcacagtatctatttgaatctgttctttttacatttttgtaaaattttctgtagaataagtgctttaagaaaaattaccaaatttagctagtttggatctattcctacctgtttgatggcattgcccaaatgtcgaagttgatcaggtatcagctgtaattctttcttcatgtctcgctcactatcagagagaactgggagctcagagtgaaaactgtgaagtagttttttcatcctttagaaaaggcaagcaaacatctcaatttaaggtctctactaattaggagaaacataatcacaagctcataattcatgaatctggtgtttctgaagtaggccccataggaagggttaggggagagcctcatgttttccccaacatatacttcagaggagaggcagggggatcagttcagttccgtaggtatgtaagcacctgccaatgcccattttcttaaatatcgttgttagtacctgactaggtaactaaatgttatacagcccactgacctgttcatgatatcctcttgtttttctttagcttcctcatatttgtcagctaaacgctcagccatttcccgcagacttttcctaatgatgtaagacacaagagactcttgaggtccaccccttgatgctgaaaccacctaatgtggctcagcatcttagggtgagaatatggttccagtcttactgacctattgtattcttcttatttttgacacttacctctcttctcgacaataactgagatcttctagttgtttctttttttggtcacataataatttgaccctttaaaaacaaaaagaaatagagtttattcagaagccaggtctaggctaccatacagcatcagctaccagccagggatcgatggtttgtgaacacaggacatcatacctccgctgaatctcctcctttgccaagtcctgtttgagaatgtactgctctctgaacacctgggtggctctgctgaggagctgaaggcattcttcaggaggaggggctatgtccttttcagaagctcttaaaaacaaagtttctacctttattttccttagctgagtaaaacaactgaaaataaatagactcaagtcacaggtgctttttaaactttttatatttttaatttatttatttgagatgcagtctcgctctgtcacccaggctggagtgcattggtgctatctcggctcactgcaacctccacctcccaggttcgagcaattcttctgcctcagcctctcgagtagctgggattacaggtgcccaccaccacgcctggctaattattgcatttttagtagagacagggtttcaccatgttggccgggctggttttgaactcctgaccttaggtgatccgcctgcctgggcctcccaaagtgctgggattacagctgtaagccaccgtgcccagcctaacttgagacgagtctcactgtcgcccaggctggagtgcagtggtgggatctcagctcactgcaacctctgcctcccaggttcaagcggttctcctgcctcagcctcccaagtagctgggattacaggcatctgccaccac[132 bp omitted]accacgcccggcctagcctaacttctttttaaacacttcctgtttatcattctcaggtgccacttccctcctgctccccattcactagctgatcaaatatatccagtttcttccaaatttatcacagtaaaaagtatatgaaacagatgaggacagaaaggatgcacagtaattctgaagacagaagagaacccattcataaaaccgctatgcccaaggttgcatacttcaaaaatgctggattggcaacactacgttgcaaaatgcttctaatatgcttttcaaaggaatctggggtttcagccagaacacggaggggagactctgccacttcaacatcttctcgagtacaaagcaggggaggagacgctggatggactgtacttctgcaaaataagtaagtaaattgaattctaccatggagtgatttactgtattacaggaaagcagaaaccacattaatccagaactttcagaatataaaataaagtgtaacttttgtaaaagtgcaagaatgcatgttttccaccttgaaaaggtcactttgggaagctacacccttattattccaatgcccctgatttgtgaaagcatttctgactgccatttccagttcttttctaaaagatcaaggcagcacaaacacctagcatggattcttggcaaaggacttgaaagccagtttataagccggagccacaaacataaattacttatttgttaggtttagagttgatcaaaaccaatattaagccaagaaactgctgtatataccatattggttctatataatttcatttctaaaaactattcagtcaagtgcaaatactcaaacttcaaaaagagcttaaaagatctcacagacttcggcagcatggcaa[143 bp omitted]aaaactgtctctactaaaaatataaaaatcagctgggtgtggtggcacacatctgtaatcccagctacttgggtggctgaggcatgagaatcgcctgaacccaggaggcggaggt[132 bp omitted]agttggca[132 bp omitted]caaaacctcatctctactaaaaatataaaaattagctgggcatgtggtgtgcgcctgtaatcccagctactagggaggctgaggcaggagaatcacttgaacccgggaggcagaggttgcagtgagctgagatcgtgccactgccctccagcttgggcaacacagcaaactccgtctcaaaaaaaaaaaaaaaaaatatccagacaattaatgtttatttttcccctttgggattcatatttattctgaagtaagctagtgtgactaggttttattttactaaatgtactgtgggtgtttaaaaagtatgctgaggtaacttacaggtaattttttctccagtgattttattatttttgtttggtcttgctagcttttagtgccttcagtgtaaataacacaaaatttatatttatttttacatccagatagtacaacttaatcaagcttcaaagactatggaagatcctctaaggacagtaaactactgccagtattaggaatttatgtcagcatccagaggtgcaagctttgaacggacaaggggtgggggtgttgtctagtgtttgaagctccagtgacttttgtttttggtactcatattcctacatttatgtaactcagaatgatcttccagggctgttggaaaaggaacatagtgattacagcttaattatctgagttccttaaaggagcaaagactaagagttcagcttttttgtttttttttttaaaagacacagggtcttgctctgttacccaggctgtagtgcagtggcatgatcatggttcactgcagcctaaaactcctgggcttaagcaatcctctcacctgagcagctaggactacagatgtgtaccaccatgcctggctaatttttttgttttttgtagagatgggggtctcactgttttgcccaggctgatctcgaactctgggcctcccaaagcattgggattacaggcatgaaccaccactgcacccagcctgagttcagctttattccagtttacatagtctacagtgtccctcaggctggcagagatggagaaattaaagagtatgagtatggacttctgagtcaatgagacctgcatctgtatcccagctctatttgttacctgtgacttcagcatttactaacctctcgatccccgtttccacttttataaaatggaaatgacagtgccttccttacagggctgccctgatgattccaggaggcagtgcgggtacgtggcttacttctgagcttggcgtatggtcacagcttgataattattactcatatcgataatggaatttggtattcaattttagtattttttctccacactctgaagaaaagctcctgactctcagctaggtgcaggggatgccagaaactatacctacaatgaaaccttatagagatgatggcaggaacagaaatatccatccttccaaccctcaagtcagaagccaaagtataaaccacacatgtatagcttcaagttggttactgagtgcattttcccaacttagatattgcagaattaacaagagctgtgtggagaatataaaatgggacgtacaataacggccatatgaggcattcataggtactggtgatgcagatcatcgtgggtcccagaatgtcaggtacaatccaaaatcctcgaattggagctggctgcctggaaaaacacagtcatagttaaattacaaagcagcaaatgcaatggaaccaagagcaaagacatgacaggtccgcggccttctcaggcctgggctgaagttgcttgggacatcctatcagtaccataacctcaaaagtggtggcttggaaacctttaatgcagctccacactaaagtctagagcccatgtgactaagtcactcaggaatccctaactgtagcgtgctgctgactgtaatctcaaaagttacacgttacactgaagatctctccaacttgcacataagccccagctatctttgtttgcctagcccagtgctaacaaattaagtgcttagaaactgttgaatgaacagaactaccgagtctctctcaatgaggcccaatgtcaatgtcacaggaaatcacttggcacgcacagcgtgtatctctctcagtcttccttcccacttcagtgaagacactggaaactgagacctcagatgggaactgtcattctgccaacatgctctcctagcggctcccatgcccatcccacctgcatgcctacaacacacatctgcccccgaatgtggatgccgcctcctctcacaccttctgaaaattgtaccatcaactgtgtcgtttcaaaatctccctattatctacttcccctcagcttgcaaactcatgtctcttccatttaaaatactctcatttcaatataatgtccagttccccttaacctattctttctcgccatccctttagaaccagcagtctttaaacagcagttgaaaacactagttccccttccatagctcccatttacctttttggacaagacatggagacgatatctggaaggttgtaaactttaactttttattatcagtgtgaaatctacacactactgggctatacactatgtaaccagtatccaggtcaagaatcaggacactgcagggggcctcagggttcccatgcgaccttccctggtcatagcctttcactccccagagaagtagccgctactctgacattcataatatcatgtctttgctttgctttatagttttcctatctatgtattcactcctaggcaagactgtttaattttacctgtttctgaaattgatataaatgggattttggggtttttttgagatagggtctcactctgttgccgaggctggagtgcaatagtgcgatcacgactcactgcagccttgacctcgtgggctcaaacaatccttccttctcagcctcctgagtagctgggaccacaggtacatgctaccacagtggctaatttttttttttgtttgagacggagtctcactctgttgcccaggctggagtgcagtgacatgatcttggctcactgcagcctccacctcccagggtcatacgattctcctgcctcagcctcctgagtagctgggattacaggtgcccgccactacacccagctaattttttttttgtattttagtagagacggggtttcacca[137 bp omitted]ctatgttgcccaggctggtctcaaactcctggcctcaagtgatcctcctgcctcacctgacaaagtgctgggattataggtgtaagccaccatgcccagcctacatgggattttattatgtattttccttgttcacttttctttttttttttttttttttgagatggagtctcactctgtcacccagactggagtgcagtggcatgatctcagctcactgcaacctgtgctgcccgggttcaagcaattctcctgcctcagcctcccgagtagctgggattgcaggtgtctgccaccatgcctggctaatttttgtagtttttagcagagatggggtttcaccatcttggccaggctggtcttgcactcctgaccgtgtgatccacccacctcgatctcccaaaatgctgggattataggcgtaagccacagtgcctggtttcactgttcacttttcaagctggtacagtttgctatccttctcattccccaccaagcgttttccctgtggtcctctgtattgccaaacctagattatgtctatttcttagtgtatgctatttgtctcatgtctgtgtatactccatgtctaacagagtgcttatgagatatctagtaattgatgaacagaataaagggaggtatctagaataccttccaggtttctactggggataactggggtgatatggcacccttcagaaaaatgggacacaggagagagagcagatttggaaagacagaagatgagttaaggggacatctggagttttatgttcctataggatatccaagtggaggagcccagtaggcagctgggtatgtgaatctggagttcagagtggtctgggctagggcgatatggatgcgggaactgtcagcactgaagccatgattacggcagaagttactcaggaaaggacctagaaagaatagagaagacccaaggaaagagttgtgagcattacttataagcagtgagtagaggcagaggaacccgcccaagaaggaaacttgagaaaagggctgctggcgggactgaaggagaacctggagggacagacgtcaaggatgccaaggagaatgtgtttcaaagaggagacatgggcaaccacatcaaataaacacagcaatgcagtgaagggcagacacagtctctgctctcatgaaacatatacattccggtagtggcgacagacattaaaaaaatgcaaatataaatagtgtaatatgtgctacaatggataagagaataggagagccccaagttagactggggagtcaagggtgttctctgtgaagaagtgacattaagatcagaaagaagggtaggagttagccaagagaagacagcaagctggggctggggctggggctggggaaggaccttccagtcaggaaacagtatgtcgagtggccctggagaggagaaagcttctgatgagcaggacactcttaggggagaagtatcacgtctgcaactttcaaatgactcagcagtgaatactgtggatgtgagtgtaacggatacaaacgtatctgaactgctgaaatgaacaattgttttctgatatacaagggagggagagtccttacctgcagggcaatggcttcgtacaaaggatgtgttcaacaaagcatttctgttctgtagagagttcctgtaaactatccttatcttcttcatctaccatggaagacattacataaatgaaatgatgcttagacaagtctccaaattaaaatgctaatgatattgggttaaatgcagtgaggttcttgtctgaaaacattgcttctcaagtactatgcttttctgacataggcatacgctttcccagggggtctagatttccgccccaagaagtaggattttccttcgtaatgtctctgaatgcaaaaatgtttcactaagaacagtgaaatcattctcttctagggtgctgcttacccacactgattttattttcataaaggttgagtatcctttatccaaaatgcttgggatcagaagtgttttggatttcacattttttttttggattttggaatatgtgcattatacttagtagttgaacatctcttatctgaaaatctaaaatcctaaatgctccaatgagcatttctgttgtcatgacagcactcaaaaacttttgtagctcactcaggttcaaggatggaaaaaagaaaagttttggatttcaaatttttcagagtagggatactcaatttataacagctttatttttttttggatggagtctccctctgttgcccaggctggagcgcagtggcccaatctctgctcaatgcaacctccggcttctgggtttaagtgattctcctgcgtcagcctcctgagtagctgggactacaggtggacgccaccacgcccaggttttagtagtagacagggtttcacggtattggccagactggtctcgaactcctgaactcaggtgatctacctgcctcagcctcccaaagtgctgggattacaggtgtgaaccaccacgcctggcctgtaacagctttttgaaacgtaattcacagtaccatacaagtcatccatttaaagtatacccattaaagtatacaattcagtaagtttttagtgtaagaattgtatacctggcagggtgcggtggctcatgcctgtaattcccagcactttcggaggccaaggtgggtggatcacccgaggtcaggagttcaagaccagcctggccaacatagcgagacgccgtctctactaaaaacacaaaaattagctggacgtggtggtgggcacctgtaatcccagctactcgagaggctgaggcaggtgaatcgcttgaacccaggaggtggaggttgtggtgagccaagatcatgccattgcaccccagcctgggcaacaagagtgaaactccgtctaaaaaaaaaattgtatacctatcattaacaatttggaatattttcatttccccaaaagaaacccacataaccattagcaatcactcctcagtttctaccaaacttcccagacctaggcaactaatctactttctgtctctgtacatttgtctattctggacatctcatataaacagccatacagttgtttgtaactggcttctttcacttagcatctgttcacagttcatccatattggagcatgtatcagtacttcattccttttcattgttgaataatactctgttgtatagacacaccacattttatctatccattcatcagcttatggacacttgggtatgtggcttctgggctatgatgaataatgctgctgtgaacactcatgtaccagtatttgtgtggatacaggtcttcatttctcttggaaatatactcaggactggactatcaggtacatggtaactctatgaataatcatttgaggaactgccagattgttttccaaagactgtaccattttacatttctataagcactgtataaaagtccccattttttcccacatcctcaacacttgttaatgtccatctttttcattttagctatactagtggatatgacgtgatacctcattgtggttttgtggtatcttatttccataatgactaataatgttgtacatctttttatatatatgctatttgcccaactgtatcaaatgctaagggttctttatattgttctccatacgagtccattatcacacaaatattttctctcattttgtgggctgttttcccttttgtaatagtattcttgaagaaaaaagatttaaattttgatggccaggtgcggtggatcacacctgtaatcctagcactttgggaggctgaggtgggtggatcatttgagcccacgagtttgagaccagcctgggcaacacggtaaaaccccatctctacaaaaaacacaaaaattagctgggcatggtggctcactcctgtagtcccagatactttgggggctgaggcaggagcactgcttgagcccaggagttcgagactgcagcaaccaatgactgcaccactgcactcccacccagacaacagagtgagaccctctgtctcttaaaagaattttttttttttaaatagggacattaccttggattatccgggcagacttaatgttaccacaagtttctttaaaagtgaaacagagtgatacaacatgaggactcaacccagcccactgttgctggctgcctttgaagatagaggaagagactacaagccaaggaatgtggcaggagctgaaaaagggtaggaaatgcattctaccctagagctttcagaaaggaaaactgctgtgccaacttaagcccagtgagaaccatgcaggacttctaacctacaaaactataagataacaaatttgtcatgttttaagccactaagtctgtgatgatttacaacagtagcagtagaaagccaataacggattcagtctttttaccattaagcattgtgttggttccaagttttttgtagatgaaaagtttcctcactagtttgaggaagttcctttctattaagtttgttgagtatttttaacatgaaaggctgctagattttttttaactgctctcactctgtgaataattggtattaattcttttttttaatttattttttattttcatttttgagatggagtcttgctctgtcacccaggctggagtgcagtggtgtgatctcgactcgaatacagcagtctctacctcccaggttcaagcgattctcctgtctcagcctcccgagtagctgggattacaggcatccgccactatgcctggctaatttttgtatttttttttttagtagagacagggtttcaccattttgaccaggttggtcttgaagtcctaacctcaagtgcctcggcctccaaagtgctgggattataggcgtaggccactgcacctgaccggtattaattctttaaatgtgaatccatgtggtcctcagcttttctttttggatagttttgattactaatcaatctctttgtgtcagtttttgtttgtttgttttgagacggagtcttgctctgtcacccaggctggagtgctgtggcacgatatcggctcactgcaactccgcctcctgggttcaagcgattctcctgcctcagcctccagagtagcagggattataggcgcacaccaccatgcctggctaatttttgtatttttagtagagacggggtttcgccatgt[190 bp omitted]ggttcaagcgactctcctacctcagccttccgagtagctgggactacaggtgtgtgccaccacacccagctaatttttgtattttaagtagagacagggtttcaccatgttggttggccaggatggtctcaatctcttgacctcatgatccgcccgccttggcctcccaaagtgctgggattaaaggcatgagccactgcacccagccttttttttttttttttgagacggagtctcgctctgttgcccaggctggagtgcagtggcgtgatcttggctcactgcaagctccgcctcccaggttcacaccattctcctgcctcagtctcccgagtagctgggactacaggcgcccgccaccacgcccggagaatttatttttgtatttttagtagagatggggtttcaccatgttagccaggatggtctcaatctcctgattttgtgatccacccacctcggcctcccaaagtgctgcgactacaggcgtgagccaccgcacccggccttttttttttttttttttttaaagcaaattatcccagaccctgattgagtcagttttggtagtttttttttttcttggaatttgtccattccatctagattatgtaaatggcatacatttgttcataatattcctttataatcttttatttctgtaaggtcaatagtaatatccctgcttttattcttgattatagttagtctagctaaaggcttgtgaaatgtggttgatcttttcaaagaacctttcggtttcactgattttctctatcatttttctattccaaactacttttctgaaatctattaaatctatttttcctctgaaatctattaaaagtgcagagagttagtaaactcacctgatccaagaaatttgtgaagtttatgaatccaagttagcccaacactatgtacaccagcttcatgagtacagtgatatcttgaaggacacttgggatctgcaaatggaatgattaatgatacaaaggtagccagtggataactaaaaaaatttacctcaaatttgttggctactccacattagcctacaaacgcatttgttgatggaaggttttataaaagactttcatattgttaggggttttgaaattttaaaatttgaattcaaatttcaaatatattttaagtacagatatacctcagagatactgtgggtttggttccagaccattgcaataaagcgaatacagaaataaagtgagtcacacaaatcttttggtctcccagtacataagaacgttatgtttacactatgcagaaagttatgtttatactagtaggtacgcaatagtgttacgtcaaaaaatatgtacataccttaaccattttttattgctaaaaaatgctgacacagagacagcacgtgctgtttgaaaaatggtgccgatagacttgcttgatgcagggttgccacatctttcatttgttaaaaaaaaaaaaaaaaagcactgtgaaccacaataaaatgaggaggtatgcctatgttttaaaaagtataaaaaatggctgggtgtggtggctcacgtctgtaatcccagcactttgggaggccgaggtgggaggatcacaaggtcaggagttcgagaccagcctgatcaacatggtgaaaacccgtctctactaaaatacaaaaattagctggccgtggtggcatgcacctgtgatcccagctactcgggaggctgaggcaggagaatcacttgaacccgggaggtggaggttgcagtgagccgagattgcgccactgcaatccagcgtgggcgagagtgaaactccgtctcaaaaaaaaaaaaaaaaaaaaaaaactcaatccaaatgttattttctaaatatgaacacaatgaggttcaccaaaacataaatacttgctggcaagtaactcatttatgcttttctctgtgcatttatttagttcttcaaaagaaaatggtggttaaaatagcagctctgtagaaaacctatgcttatgcttgcatacatcgacttaaataaaattgttgaagcaaatgcacttctacagcatagttatcacaaaagactttaacacaacggctcagggaacagttctatcagtgtagtaaggtgtgaaatgagaagtgaagtttcgtatgtcttcataatgttgacttacagatagtttcaaaggttattttcagttttggatgctctttttgtttgacaatcatttataactaagaagtatgagtagttgttatacaattttaattaactgattttgaaacaaaaatttctgtacctcctttgagccccagtatcagtaagacaatcctgagactaaaagataaactactgaatacctattattatgtataaatatttatctctgtaactcaatatttttattattaatattaataataatcttattggccgggtgtggtggctcacgcctgtaatcccagccctttgggaggccaaggtgggcggatcacctcaggccaggagttcaagaccaacctgaccaacatggagaaaccccgtctctactaaaaatacaaaattagccaggcgtggcggcacatgcctgcaatcccagctactcgggaggctgaggcagaagaatcgctcgaacctgggaggtggaggttgcggtgagccgagttgtaccactgcactccagcctgggcaacaagagcgaaactccgtctcaaaaaaaaacacaaaataataatgttattaaactaaaacaaaatacagagataaggtatatattaaagctgataaaatggcaacaataacccataaaacccctaaattaaattttcctttaatctaacagtctcactttgtggttagtgactttatcataaattaatattctaaagctgatatattatttttctgtcttatatattgaggttccataaaacatcttagaaaacagcattctgctataaaaagtttaaaaaaccctcatctatgggaatcatctgtttgcataattaaaatattgaaaattttcttttcatttgcgtatgttttaagacttaaggctcaaatcatctcattaaatctaacattgttaaaatggcttttcaaaacctgtagtgctaacatcaacagaaaagtcttaacactggggtgtaaaacaaattgattactaaaaagagccaacatttacttaacaggaaatttgttagataccaccctatgctatactgtagccatttcactttgtcactaagaaatctggtgtgcctcagtgattataatatgccttgttcagcacaattaggaacaagtcaaaaatttcttagtttcacatatgaaaatgttactctcattagaagaaccaagaaaaggctgggcatggtggtttatgcctaaaatcccagcactgtgggaggccaaggtggacagataaggagttcgagaccagcctgaccaacatggtgaaaccccatctgtactaaaaatacaaaaattagccaggcctggtggcgcatgactataatcccagctatttgggaggctgaggcaggagaatcgcttgaacccagggggcggaggttgaagtgagccaagatcgtgccattgcactccagcttgggcaacaggagcaaaactccatctcaaaaaaaaaaacaaaaaacaaaatacaaaaaacaaaacccaagaacaaaacgtccacgtctacacttaagatttcccaaagatatacgtatctatatgaggaaaccaattagtttatgtcactttacttcatttggtctgtttcctcatctataaaattcttagacaatataaatctcaaaataccttaattagacaaacccaatgtacactctttgctggtttgttatgtaaggaattctgcccccttaaatgttttgcctatactttagtacagagttgaggccgttattaccagaactaggcaaactggctaacaagaactgtaaggagagtaggtcaaactgctacaagattgaaatcctcctatgttgcagtgaatgacacgatttcattcttttttaaagccaaatagggctgggcatggtggttcacacctgtggaccagcactttgagaggctgaggcagaaggatcactggagctcaggactttcagcttggacgacatggcaaaatcccgtatctaccaaaaatacaaaaattaggcgtggtggtgcacacctgtagtcccagctactccagaggctgaggtgagaggattgcttgagcctgggaggcaaagcagtgagccaagatcacgccactgtactccagcctagatgacacagtgagatcatatcacacacacacacacaaaagccaaatggtattccactgtgtatacaatgccacattttaaaaatccatttggggccaggtgcgcggtggctcacatctgttatcccagtacttctggaaggccgaggcaggtggactgcttgaggccaggagtttgagaccagcctggccaacatggtgaaatcccacctctactaaaaatacaaaaattgccaggcgtagtggctcacgcctggaatcccagcactttgtgaggtcgaggtgggcggatcacaaggtcaggagttcgataccagcctggccaatatggtgagacccccgtctctactaaaaatacaaaaattagcagggcgtggtggcacatgcctgtagtcccagctactagggaggctgaggcagaagaattgcttgaacccaggaggcggaggttgcagtgagctgagatggtgccactgcacttcagcctgggcaacagagcgagactccatctcaaaataaatgaataaatgaaataaaaatataaaaattagccaggcatggtggtgggtacctgcaatccagctacttgggaggctgaggcaaaataatcgcttgaacctgggagatggaggttgcagtgagtcgagattgcgccattagactccagcctgggtgacagagccagacaccatctcaacaacaacaacaacaacaacaaaatccatttggtctgtcgatggacacaggttgattcagcatcttagctgttgtgaataacactgcaatgggcatgggagtgtaggtatcccttcaacctattatttcctttccttttgacatacccagtagtggaactactgaataacatggtagttctacttttgaaaggaccaggaaaaattcactattaggaatctggtgatctggaccaaagaccactattttaaaacttgggaaatttgctcagtctgccttagacaaaaagtgtactatagtgactaaaaagctaaaaaaaacccagtcaactttttaaaggctggaaccacagaacaaatacattacataggaacagtctatgatagtcttagtataaaaatcatgggaaaaaagcactacatttattgaagagcttacctctatgaagtttgactggacaagaaaagtcagaatcaaaagggtcatcctctccagatgccagtttcaaagcaagctccaactcaacacattcaaacacatacagagaaggaatgaggtcaatcctggaatcccaggacttttctgactgtaaaaaaaagtgttgtaattttgatcttgcatgttaatttgaaaatgtaca[133 bp omitted]gaaaccctgtctctactaaaagtacaagaaatcagccgggcgtggtggtgggtgcctgtaatcccagctactggggaggctgacgcaagagaatcgcttgaactcaggaggcagaggttgcagtgagccgagatcacaccattgcactccagcctgggcaccaagagcgaaactctgtctccaaaaaataataataaaaaataaataaaaaaattgaaaaaaaagctgggtcaaacagtactttcaaattcttaattccacctctatcctaacagtgcactgttattctgaagacaaaacgtctctcttcctttaggaagatgtttgtgaaaaaagccaattcagtgattccaaggctctttgtatctgtccctgaagattgcaatatagagaccagaaagtaacatgcagactggtggaccaagtaagttgggcaaccttctaacttctttccacttagactgctaagtgtgcttcagctacttttttaactgtttaatttccaaaatatcagaagttccataagtaagttaaaattccttctcatatattaagcattcatattgggtcaggaactatgccaggtgttgaagatacaaacaaccacagcagcctgcacttaccgtgtggtcatcttcttcttccccttctagcacgacacagtgatacagcattcctgattcagtagcgatcactaagatattggggacacagggtaagcagagtacagcacacgcatcataaccatagttatcttcagccgcaggatgcatgggcaatggacccaacagctttccaatatttccagggctaaagaaggagtaaaaacatatttgggaaatgttgacagtatgcatgctcatcccataaaaccattctttgactttgttttcctccagctatcataccttcattataaatgtagtgtattcccaatactccatcttctcgctttcccactcagatcccaccactctgtgtttctcaaccagagataattttgccctagcggacagtggcaatgtctgaagacattttggcttgtcacaactggttgtcacaatgtggggggaggtattagcatctagtggttagaggctagacagaagccgctaaacattcccgcacagcacagcacctctaaaacaaacaataattcagaccaaaatgtcaatagtacaaaggttgaaaacccttgccctaaatttactatggtttatgctttcaccactccactgaagctactgtggcaaaggtcacctgtgagatttgctaaatccaaaatgcacttaaccttctgctgcatttatcactggttaacgactactgctactcaacagctgtaacaattctttcttgtagttctctcttcctacctctttaaacacaattttctaacgtccttttctaatttctgtctcttaaatattggtgttctccaggattctgttgtatgctttgacttttttcaaaatacacacttaaatgagagcctgttaaactatgcctcgttttaactaccatctatattcaaagactaccaaatcctttcttctaaaatgtagcttctcttcaaggctttggatccccatattaaatttgatttgacaaatacttattattgagtgctagatgatactcccagtgaatgatggtttagttgatgaggcagacatttaaccagaattactataccatgtgataagtgcaacaacagaaggatttatggtgtacaaaggaatgacaaaaagatacaaagataatgaagaaagctataaaaaataaatgagaaaaatgagaaagaatgatttctgggaaggggattgttgagcattccaagctagagatcagtttatgcaaagtcctggaaacatgaaagacaaagaactaagaacaagaaaacttatttagtatgatgggaggcaaagtacaaggtggaaggcaacggcaaaatagctagacagacatccaggactggcttatgaagtacacagtcttgtgtgctatgttaaactatttgaaatctatctgccgggtaacagtatatcactagaggtttaaatcaagcgatggagcctcactttacaaatcagtctggtattagggaggaagacatggaagggtccaaaatgggatttggggaaactatttaagaaaataagccaggcagatggtgaagtaggcagatgatgcagttctgaagcagggacagaggaatgcagagaagggtgtataatcaggggtgtccaatcttttggcttccctgggccacactggaacaattgttttgggccacacagaaaatacactaacaatacgtgatgagctttaaaaaaaaaagaaaagaaaagaaaatcgcaaacaaatatcataatgttctaagaaagtttacaaatttgcgttgggctgcattcaaggctgtcctgggctgcgcgcagcccgtgggttggacaagcttggtgtatactttcgaaaaatttaaatcacaaaatcaatagaaatttgggactgatgaaatgtaaggatgaagaaaacttttgggttttgggctaacgttactaggcagatcatggtttggacaaatgagggctcagcagcaagaggagaaagggtaagggaaggtactaaagttaccacaaaatcctcctgagatcatgtgtgaaaggcagagaacatttctgccaaggagaatgcactcaacagtgaatcctcaccattctgtaacctaccgagctctttcatctttctaatctttatggttttgcgtactctcttctctctcctgtacccacttctgattctgtctagtgaatccttcaagttcaagcttttgtaatagcatttccttaaagtcttccaagatgagcaggcctactcatttactccatcacactcctgaagaacccggtgatgccctgagcacatgacactgtactatagttactggtttagttgtatgcccttctggtagttaaggaaccacatggcaggaaccttgccttcaatcttgtatttccatcttctgccagagtgggtcctgaataagtatctgttaagtcgatttacaagcgaataaactctaatgctcagcccttagccttatgcctctgcagttttccctcaaattcttatcctgtatagactctctcaccatgaaagatgattctcatacctctattttaattcttcttgtctgtcatcatcctgtatttccaactgtccatggaatatttccattttattggtccaatactatcttacactgatttacttagaaataaatcttctcccccaattagcagcctttactgacctgtttctgttcatggcatactcccttatccaaacagtaactaagtcttatttatccttcctttgttgttatctactgtgtttcatttttccctctgttctattaccacccaagttcaaactctcataaatgacaagctcaattttgcaaaagcttctttaaaagtctctgtcccagtcccctccctaaccaattgttttgtccttctgttcagaaaccatcactggcttcctactaccctattcctacagaaaaaaaacccacactcactcttttaacgaggtatttttaattccagcaaattttctcgggacagatactccagctttatcacttaatgctccctacatgaatcctcagctctagcccagaatgtctaataaattaagcttgaatgacacttgcacttgcttattttcagacgctactttatgctgcccttgacagaaatggtctcactcttccttgatacttcatttaatcctgaatgagacctttaagtcacacatgacaccactccttctctacgaaaatttccttaacctcccagtcagaatgatctctccttcctcggggttcttactgtctgtgtaccaatactgtggtatggatagtattttttcatgtgtatgtatctttctccccacaactgggacataagataccagattaccacgcctacgtggtgtcttgttcatataagataaacaataagcacttgttcggataactagaatttgtgaacacaaatccaggcctatcataagtgattatccaagaattctatagaacttacccaaataatatgaagaaatgaaaggccaaatgacctgtactaactctttctcaaaaatatgcaagccaagcatgtgaaggctgcaacatttccacagactcaaaaacatggctcccaagtccagcctcaatgatatctactggagcccaaactgagttttcatttcaggtgggtgaccacctcaacttacctgtgtaacagactgatgtatgtcaggaaagtctctccattttcatataagatgtacagtgggtatgccactacttcatctttgccgttttgtccaaatagagtctttgggactgctgccaatggcccaaagtcaaatgcaactgctgtctctcctagagatgcggtatacgcccttctggaaagagatgtaaaaaccaacttgttaaaaacaaaaacaacaaaaagtaaaaagaaaaacaaaacaaaacaaaaacacaaaatgtctaataacaggaggtgggtatgtatggaatttgtaggcaatggactgaaaagacaaaaaatgattatgaagaatgttaacatttaaaaattctcagctgggtgcagtggctcatgcctgtaatcccagcaatttgggaggccgaggtgggtggatcacctgaggtcaggagttcgagaccagcctggccaacatggtgaaaccccgtttctactaaaaatacaaaaattagttgggcgtggtggcaggtgcctgtagtcccagctacttgggaggctaaggcaggagaattgcttgaacctgggaggcggaggttgcagtgagccgagattgtgccattgcactccagcctgggcgacaagagcgaaactccgtctcaaaaaaaaaaaaaaaaaaaaaattctcatgaaattaagtgaaaaaagctggccataaaattatttggttctactctcatcttaaatagtttaaatacacagatatacaaatagcaaaaatttattatatacacacacataaatgcaaaaaggaaacaggaaaacacatgaaaacatcaacagttgtctctgagcagcaggatccgtaagttctacaaatactcgcaaagcacctactctgtgccaggtacttttctagggtctgggaatatgtcagtgaattaaacaaatgtcctgccctctagagagagaaataccacaaaaagagaagaaataaagatggaacataaactcagaaaatatcatgaaaaataaagtagggtaagagggtattgatggaggtgctactttagactacttggtataggaaagactctgataagatatttgagcaaagatctgaaggaagtaagagagcaagtctgtggttaactagggaaggagcagttgaggtggagagcaaatgctctaaggtagaagtgcttaatgtctgtggaatggcaaggaggccaaggtgcctggagcccagagagccagggcacagagggaggaatgaagctggaaaggcaatcaggtggcatacctgtggaccctttataggtaaagactctgggaaatcaatggggtatggagagcagggaagtagaatgatctgattaaactgatctgattaaacttagattaaagtagaatgatgtgattaaactttgggtgctgtattgaaacaggctatagctataggagattacaaagattttcattttcttcctaatactttgatctatttttctcaattttctacagcaaatatacattacatgtatatcaagaaggcaaatcataaaaccatgctgtttttatatttaaaatttactgtagttattcaggaagattctagttcaatacaaagttaacaaatatggttaaaatgaaatcacaatttcatatagttgagagagcaaacatcaatgcaagatattatcttagtttctttatcacatagaaaggtgataaagaaatgaatggtggctcaggcctgtaattccagcactttggggaggctgagacgagcaggatcacttgagcctaggagttccagaccagcctggccaacacgacgaatccctgttctactaaaaatacacttacttctcacattaccaaaagcatgctagtcacctctgaaaaaccttgcaacctgttaaaattgcatttataatcccaataagctaattaaaaaaccatttcaagactcaaataaaaacttaccctttattgagtactagactttcctcttcggcttctgaaagtattatcacgttagtgggtgtctgcggctcacgtagtgagtaaattctagcaaccaaaagagaagaaaaccagcacttaaaattctgttttcatttcccaaaactgcactttcctctccatctagtcagttcttgagaattttctaacacttatcacaactatttctttgcaaaaatcttgctgttgcaaagtagtctagttcatttattctttaactacataagggagtttcattggggcctgaagaaatgttctctatccttaccaataccctttaacagcctattccataacatcgcacctctgtcacttccgtcctgagcccttagctatactcgccttgtccagtcatctcactattgcccctaagcttgccagttttccttcaactacacacatctatctctgcctattggacaccaaatcccaccagagaaagaactgtatcttattctttatatgccaactggctgacagagtgagtgatatttagcctgcaaatctacttatgtgtttgttatataaaaacccaatattggccaagcacggtggctcacacctgtaatcctagcactttgggaggccgagg[131 bp omitted]gaggcaggagaatcacttgaac[138 bp omitted]atctctattttcaagggaaagtataatactgaatttttttaaccaaaattattttaatttaaagtaacctacatttcacagcatataaggctattgtgaaaaagggaattttcaaaaggccagtaatgtcattttagaaatccagtgtcccttataatcacttattttgtctgacgccactaagaattttttaacttggtttcttccaatatcaataaaatgccacattaagtatttaataaatttttaatgataacttgatccatttgaatacacatttattacagtcttcctaggttcctacaagcgttactaacttcaaaatacacataaatactaggcaataatgttgtactggggaacagtgaaagaaaaagaaggtgcaacagggcattcggtgaaaatttccttttgctctgaaactgcccaaaatctccaaagcttaggaaaacagaagtgttaaataccacatattttaaaaaagaaccttcaatatttggggccagatacttcctttggggcttaagaactgtacctatgctatcttcccaccatctccttttccatcatagcatataaaaggaagactaagaagagaggatgtcaaagattccttaggagtacagtataatgtttgtaatgggaagattttccctctcctctttctctgccctgaactctaaagccaaatgggtgggcagggaaggctctaggaaacagccagatgtggaggtacctgtaataagggagactggtgcatttcctagctgaatgccccttagtcacttagtagctgtctcagttataagatcgaaaaaacatagcaatacacacgtatcacgttcagtactatctacagtttcaggcattcactggggggtcttggaacacacaccctgcagataaagtatactgtaccccatcttgagagaagattcagggcatagagaactgacaggagccaatgggagccagagctcctcagtgatggggggagctggaagttcaacactgccctccaacaccaccccacccccccacatacacacacacaaacacaccatctatgcagagactaccacatcaacagagttcactagtgacagatggaacgagattcaaacaagatcaggcatacttccccatcactcacaggctaccagttcggtaagatctctacctcacctgtcccactcccctaccccacactgaaggagttagatttggaggaaggagggggcagcccattccttacacttcaccctatgttccaaagtgctgggataacaggaagagtgaaagagcagaccgcacactctccaatcacttctgatcccacaaaacacaggtctgacctacaaaagggccaggacatagttgtgaaagatttgagatcaaatagctttcgacattcttattttctttagacagggttttactctgtcacccaggctgcaatcttcctacctcagtctcctgagtagctgggactaccggcacatgccattatgcccagctaattttttttgcagagacaggatctca[131 bp omitted]ttcataactagaagtaacgagaaagctatggggatctgtataagacatcattaaggggtgagtcattcagcagtgaaggaagatttagtagagcacagttaaaagcagtgattacgaaaaataaaactgaaggtatctgtacctctgctgagtccccccaataactttttacataaggccgatccagaaagttagctgataatagagtagaaatctacgtagcattagggcatttaatcatagagtgcaaagcttggaaggggcgttagaaactattgaatcaaacctgctcaatttaaaagattggaaactgagccccccaacccctaaaaagctcaagatctcaaagataacagaaaaggaggtgggacaataattcaaatctctaaatttacacttacattctctttcctttatgctacattattaccaaaagggtgacaatgatgaaagagttttggaaagattattctaaggtgtcagattaggagaggagatacctggaggcaggaagactagttgagaaggaatagtggtaagttagagcagttaggcaattcttatgattgagaatgggttacaacagccatccaataaaagcactgactcattcaatgactcacttcgttctatgttgagctgttaattggcaaacagaaacagagctttcccactcgcaaggcttcaagagagagaaataaaatttacctgattacgttgtctgatgttaacagcactacgtggggatccaggatttcacttggataccatgcagcatgctttagagtcagagaggtggaactggtgaaaaatctctccgcaactggagtggtactaaaataaagataataattttccaaaacattttgtacaacttggatgaaaatcttctaaaggaacttcttttttttgcagatggagtttctctcttgttgcccaggctggagtgtaacggcacaatctcggctcactgcaacctccgcctcccaggttcaagtgattctcctgcctcagtctttcaagtagctgggattacaggcacctgccacctcgcccagcgaactttgtattttcagtagagagggggtttctccatgttggtcaggctggtctcaaactcccgacctcaggtgatctgcccacctcggcctcgcaaagtgctgggattacaggcatgagccaccacgccaggccctgaagaaatttctattttaacactctttgattctctttccttcagatttatttccctgaaatcatgctgagaggacattcaaggcatctattcaatcaatatcaaagaattgaaataaaaatatcttctaaattatagcacactggctgggcgcaatggctcacgcctatcttagcactttgggaggccaaggcaggtggatcacctgaggtcaggagtttgagaccagcctggccaacatggtaaaaccccgtctccactaaaaatacaagaattaggcaagtgtggtggcacatgcctgtaacccgttacccgtgaggctgaggcagaagaatcgctggaacccaggaggtggaggctgcagtgagctgagcttgtgccactgcactccagcccgggctgaggaggttgcagtgagctgagatcacgccactgcactccagcttgggctacagagccagactctgtctcaaaataaataaataatttatttattttaataatttaaattatttatttaaattttatttgtttatttatttgagatgaagtctcactctgtggcccaagctggagtgcagtggcgtgatctttgctcactgcaacctccgcctcctggatttaatcaatacttgtgccttaacctcctgagtagctgggactacaggcgtgtgccaccacaccccacttattttttgtattttagtagaaatgaggtttc[132 bp omitted]atacattttaggatggtttgacttaggattgatacatatttatacagtacaagtgttttcagatatagtatctcatttgatctttttactaaccctgtaaggaaattacaagggcagatattatcaatcctatttttaaaatgaggaaacagatttagaaggtaaacagtttaaggggactcaacttataagttgcggagctaaaagcagtttctaccttatacagatgatccccaactttacaatgggtttaccagtacataagccaacataaactgaggagctccttacgacttatgatggggttacccatcataatgttgaaaaatcctacgttgaaccatcctaaatcggggatcctctgctgtgttgtcagcaataaatccattttcaacttacactgggtttatcgggacataacccaatcgtaagttgaaaagcatctgtactcttttcagtagatctttcagattcacttttctggatttgttgaaaaagaaattatataaaaataggccaggtgcggtggctcacacctataaccccggcactttgggaggcta[134 bp omitted]gaggcagaagaatcgcttgaatccaggaggcggagcttgcagtgagccgagattgtgccactgcactccagcctgggtgacagagcaagactccatctcaaaaaaaaaaaaaaaaaaaaaagtatatatatatatacacacatacacacacacacacacacataaaatacttacacttctggcaaacttctggctgacagataactggttttacaaaatcttacttctacctaatcgaaagaatggcctagcctcaaatgagacagcaacgtggtacttcaggcagaataaagtacaatcaattacacatatactatgaacattgataacacagaagccagtctgcagaccacgaggagtgttttaatgttttaagagtagtatactaaacatgcttaagaaccactagtcttgaacaattttctgtatatataataaattatacagataaatagtatacaacttacctacaattcactgttgattttccaccttcaaattcagaattcttcccccatcttttaggtaattctaataccataagtccttttattcctataagtgctacatgatgttgtgttgggcttaacaagacttgatagatttcaaacaggggtggatttatgcaaagcaatctctgaaaattagagcaaaccagtcaacatagttaattttaatttaaatataggtggcagttacttgaaatcacagtaatacttagtttactacaattataggataataaaactctggataagtactcacacttgtaccattaactcacaaatttttttttttttttttgagacagagtcttgctgtcacccaggctggagtgcagtggcagcccactgcagactttactatgggggttcaagtgtcctccccacctcagcttccagaggagctgggactacaggtgtgcaccatcactcccagctaattaaaaaggttttttttgtagagatgggggtttcgtcatgttgcccaggctggtctgaacacctgttcccgtgctcacaagatccacctgcctccaccttggcctcctaaagtgctgattataggctacagctaccacacccagcttactcatgcttgcttttaacatccaaagttacaactcatgataagctgctttcttccccatctctaaggttttgagattttggaggagtgaaggttattgagatagtcaccaatatttactgaaagcttataaattctgggcactccagcatttctgtatgctggacatacaaaaataagtaaatagccaggcgtggtggcacatgcctgtagtcccagctacttccaggcgctgaggtgggaggatcactcgacccctgacagtagaggctccaatgagccgtgatcacaccactgcactccagcctgggcaacagagaaagaccccatttcaaaaataaaaaataaaatacgtttttaaaaaatgacaagggcagacccagcccctgccttggagcttacagtctagaaaagaagacagaggcagagtgccatggctcacggctgaaatgccagcactttgggaggccaagacgggtggatcacctgaggccaggagttccagatcagcctggttaacatggtgaaaccccgtctccactaaaaatacaaaaagtagccgggtacggtggagtgggcctgtaatcccaactactcaagaggctgaggcaggagaatcgcttgaatccatgaggtggaggttgcagttagctgagattgcaccactgcactccagcctgggcaacagagcgagatcctgcctcaaaacaaaacaaaacaaaaacagccgggcgcagtggctcacgcctgtaatcccaacactttgggaggccaaagccagcagatcacgaggtcaggagttcaagaccagcctggccaacatggcgaaaccccgtctctactaaaaacacaaaaattagtcgggcgtggtggcagatacctgtaatcccagctactcgcggggggggctgaggcagaagaatcgcttgaaactggaaggtggaggttgcggtgagccgagatggcgccattgcactccagcctgggcaacaagagcgaaactccatctcaaaaaaaaaaaaaagacacaaaataattataaataattaagttatgattatgtcaaatgctacacagcagtatagaatgttattagaatactgcgtgctgcacatttggtaattattattattttttgagacacagtcttgctctgttgcccaggctgtagtgcaggggcgtgatctcagctcactgcaacctcctcctcccaggttcaagcgattctcctgcctc[134 bp omitted]ctgcctcccagtgttgggactgcaggcgtgagccaccgcgcccggccttcataattctttttaactgaaattgggtaaataagtagactgtagactcctgccctattttcaaaactgcagaagcattgctagcgtcttattaaaattaaatcacttctcggtaacaagaattggaccgggcacacaacagatgtcataccttagaatgagtaccaagctctttttcatctttaagagaatctgtgtattacaaataaacatttccataaaccaatatttgaccacggcaagtgtgtaatactttctggatcacacccattttcacatgctgtcggctaatcaaaaacaaaaatccccattttgggtatggctttattttctaaagcgggcgttacgggggtaagaattaacagagacttcctcctccatgtcaagcatgaagcgtggtgctttgaaacctgcaacctgacttgctgtgcacaacgcaagagaaagttacgatctaacctattataagcgtcacatcaggaaacaggtttctctcgacgaaactaaaaatagcaactccgcccactcgttctcaacccctttagcccgctttgtttttctccagagcactcatccgtcactagtatttttattgaatattcaatgaccctttccttcctcccaggcctccaggccgtaagcatcgagagagcctgagtccccgcgaccgcgtatggcagcgtcggagtcaatccgctggaacgcctgccacaagatgaaaaacagccaagaggagcaaggaacaaaaaagactggttccgatcccggtgagggtcacttccaagatcggcctggcattacctggtactgggacagggcgggctcttcgccgccgccgctggggccccgaaggcgaacgactaagaaggagctgtcttctccgtcccacaggaaaagctctccgccgaggccaaagaccacgtttctcgtcagcaactgcggcggcggcgacgaaggcaacgacgaagaagctggtttctcagcttcggttggactctggtttttcagtccctcccggagccgcaagaacacgacgtggttaggaagccaggtctgccacagctcgccgtcgcccaccggtccctcggcggccgccatcttggcccaactgctcccctcactccagttgctcagcccgccgctgagcacagccaatccgcggccgtccactcactgtttcggccaatcaccgagcagacggcccggaagctcgagaggctcgtgccaggtcggggggcgaaggcgaggccagcccaccaagcaggggcgtcaccaagggaaagccaatcaccattatttctgaagcccaagggggcgggacgagaagtcaacataatggtggtgctgctggaaatctagcacctggggagagcctgagacttgtgtatctaattgcctattggacacctccatctgggtaaacccaggcatccagaactttccctcaagacttacctccctcagtgcaggtcgggctggcctcacgcatttcgcttggatgcctaaatctgtctccacgtggggccggtcgataaaacaacacttcccagaatacgctgcgatccattcgcggtctgcacccggaaagtacacctcccaggggtctgtgcgcgcctccagggaacgggtcttgtggctttgtctcccgcgaagaggagatggcggagtcgttgaggtctccgcgccgctccctgtacaaactggtgggctcgccgccttggaaagaggctttccggcaggtgggtatggggtttgtgcagtggtctaccctagatcgtcccggtgaccgccgtcttccctgccttcgccttagccctgctccgtggagcaggtgccgcagcgcgcctggtctggtcaaacccaggcctgctgactgtagagtgtgggattagcccgggtcggtcaagtcctagaaagccttgtttttggattcgattttgttttgaatttaaattgtggtcaggacatcaccgtttgcacctctgcaataacactacctactgttgctgcggaggtggccaccgagagaggcactttgtctacgttcgtcttgtgagatagagatgatttctattctagagagtagtaaaatgaggcttagaagagggctccacctcagttctggcctcttctgaacacagtgtggttattagtaagtaatgtccaagaaagtaacccgacgcaagaaagatagcagatacagcagagtttctcagccttgacaatggacattttgagggagatatttatatgttgtggagggttgtttaagccacgtctcgggcctccacccactagatgctaatagtcctataactagaattgtgacaaccagaaatgtctccaagcattgccaaatgttccttgggggacaaaacctccctgagttcagaaacgctgctgtgcaggaaggccgttacccagccatatctagagtagcaagaatttggaaggaatataaatgttctgtaataggacattggatgctgagatattatgcacacaaccattaaggaaactggcaagctagaataaaaaatatggttctttgtaaatacgtgtacaaagcattgtaattttatgtatctctacagaggaatatgcaaaagtaacactagttagtattatcattgaaattttgtgtctataaactttctttaatgttttctcaactaatgtaagagtgttttttaaaaatagaaatgctttttttttcccccccaatcttgctcttttttcccagagatgcctggagagaatgagaaacagccgggacaggctcctaaacaggtaccgccaggctggaagcagtgggccagggaattctcagaacagctttctagttcaagaggtgatggaagaagagtggaatgctttgcagtcagtggagaattgtccagaagacttggctcaggtcaggctgggctatgtgttttcagggagggggactgcaccaccaagaacggctcgtgtcctcttttatttgtttacttgagtcctctaaacccaccattcccctaaccccatttagaattcaacagcctttaacccaggcttttctacacttaatgttagacttgtctagatgaaatggtctgaaataccagaccgtagacctgctcatcactgcaacatcatcatttatgaaactaaaaagaaagaaatttcatttcttgcctccacccttggaaattatgattcagtaggcataggctaggaatctctttctctccctctctctcgctctttttttttttctgtcttgctctgtcgcccaggctggagtgcagtggcaagatctcggctcactgcaacctccacctcctgggttcaaacgattctcctgtctcagcctcccaagtagctgggattacagatgtgtgccaccatgcccggctaattttgtttctgttttagcagggatggggtttcaccatgttggccaggctggtcttgaacgcctgacctctagtgatctgcccacgtcaggaatctctttctaaaaaggtctccagaaactttccgattctaatctcagccaacgttggcagccatgtgtggaagggaaaaccatttatagtgtatcaggaagaacactggattcgaagtcaggagttccagaattcaaatcctggtttggctattgactgttaacttcagtttgcctctttgaggtttagttttcacatttataaaatgagaagataatgttttcagcattgtaaggactgtgtaagaaaatgtgggcaactgtttgaaaccatcaacaccctgtgtaataatgatgcattattcagtggcttttgtgtgtcctgcagtacaccaatgtttgccttatatcaccacaactagtactcacagtaaccctcttagatagattttattcccactttacagaggccaaaactgagatttgcagagattaggaacttttcatgtggttacgtagccttggaagaatatgtacctaactgctaccctatatcgtctctccaaaattgggtaccattattttgtcactggatagttggatcatttgttgatggcttgtcagcatgacagcattaccccactgtcagcatattctgcaggaggactggactgattttgtccaataaatctgggttcttcaagccagcctccaagtatgaatcactgtggggcttggttggtgattaatacttcaaacttctgatgccgctcctttctcttccagctggaggagctgatagacatggctgtgctggaggaaattcaacaggagctgatcaaccaaggtaacccctagtggtagtccttccttacctgtatttagctactggaatactgtgacctttcctccaatcaggattagtttataagtcccctttgtctacctccatcagtcaagtgtccaaaagactccttttgtactctgacatcttggctgtctagcttctcaataataagggtctccagggtgctagaccttgtgctaagaacttctcatttaatgatgctgttttctccatgtgactgccctgtaagatagtagtattagaacagaaggtggttggtgttctcgtgcaggtcatacagctagtaagtggaggagatgggaagcaaaatcagttgtatgaatccagttcccatgtttcttctaccatcctgcctctctattaatgggttaatagttcactgagggtggtggcttatgcctgtaatcccagcattttgagaggctgaggcaggagtattgcttgaggccagttcaagaccagcatgggcaacataacaagatcctgtctctacagaagtaaaaaaaaaaaaaaaaaaattatctgggtgtggtagcaaatacttgtagcctccctcagccagaaggcttaggcaggaggatcacttgaacccaagagtttaaggttacagtgagctataattttaccacctcactccagcctggctgacagagggagaccctgtcactttaaaaaataaaataaaaaaaagtaaacctgccattttacaggatacagtgatagtgcatggtctgatcccttgccctattcattttaagtgccacattctctattaactccccagggcctgtgagcatccactccttgagggaggtgtccatagcatggtgtagagagcataattttgtaccttatatagttaagtcatttattccatgtagccctgatttgattaggccttgtttggtttttgtttttgttttttttgagacagggtctctgcccaggctggaatgcagtggcgtgatcacggcccactgcagccttgacctcctgggcttaagcgatcttcccacctcagccttctgaatagctgggatcataggcgtgtgccaccacccctggctaatttttttttattaattttttttttttagctaaagatgataaaaacaagacaaaaaattattttatttatgtattttttttttttttgagataggttcttgctctgttgcccaggctggagtgcagtgatgtaatcatggctcactgtggcttcatcctcctaggctcaaccaatcctctcatctcagcctcccgagtagctgggaccgcaagtgtgcaccaccataccgagctaatttttttatttttttgtagagacagggtctcactgtgttgcccaggctggtctcgaactcctccctggtctcaagtgatccccccacctcagcctcctaaagttttgagattacaggcatgagccaaaatgcctagcctaattttttaaatttttttgtagaggcagggtctcactatgttgcctaggctggtctcaaacagctggactcaaaccatcctcctacttcagcctcccaaagtgttgggattacagacatgaggcatggcccccagccttaggcttcatttttatgacctataaaatggagagaataccctataaatttgttgtaaggcttaaataacgtgtgtagaagacttagtgcattgtctggcatatagagagctttcaataatcaacagctattattatggtgaggcaagagcacaagctcttgagtcatacctctaacattcacttggctttactactttaatttgtgtggcaccgaccaaagcacttaatttccccgtgcctcagtttcttcacctttgaaataaggataataatagtgaagaagttaatatatgtaaggaatttaaaatagcatttgacacataagtgccatgcaagtgttagttgttaatgactgttgctgtcgactctggttagactgtaaattccttaagttatcatctttttttattgattttcccttcccccacctacaaaacctatcttagtggtgaaacataagcctgaccaaatgttttattttggggcatacttaactaataagtctgaagtgacaaggatttactgtgttgtgctgtactcagccataaggaacattctaaagcagaagttggcagactttttgtgaagagccagatagcaaatactttagacttcacagaccatgtggtctctggcacaatttctcagctctgcagttctagtggaaaagcagttatagacactacataaacaaataagcgtgactgtagttttttgaccccttccctaatgtctagactgtgagctcaacaatgacagtctttttcatctttgtgcccctgtgactagcagatactaggtactgttgtatgtttgctgaatgaatgagcacacagattctgaacaacacagattccaagtatgtggaatcagcagggtcgtcctggcatcagaaatcagttctctcttttttttttttttgacacagagtctcgctctgtcactcaggctggagtgcagtggcgcaatctcggatcactgcaacctccgcctcctgggttcaagtgattcttctgcctcagcctcccgagtagctgggattatagacgtgcgccacatgcctggctaattttttgtgtttgttagtagagatgggtttcaccatgttggccaggctggtttcgaactcctgacctcgagtgatctgcctgcctcagcctcccaaagtgttgggattacaggtgtgagtcaccgtgcccggccagcaatcagttctctttgtcaactttatttagttgcctgtgggaccctgacattctgtatctgtgctcctatggcctctggagatgtgtgtgaaaattgtctcctcggcccttagcctacttcacctcttgtgctcacaaaaaggggacagagaggagggagaggaatccagcaagatgaagccagcctgagagagcataaaaaccagtcattggtattgtggtcttgcccaaatctttccctcgtgtgaaggaagcctttgacagtgaagtttagaattaaatacagggccagctgaagcatggtgaagccctccaactgcctttgccttgcagagcagtccatcatcagcgagtatgagaagagcttgcagtttgatgaaaagtgtctcagcatcatgctggctgagtgggaggcaaacccactcatctgtcctgtatgtacaaagtaagagtttttaaaaccttttcagcattattcgttcccattccccactccaaggtgagtggaatctccccccagatttgttgcctgaaattcaaggtttggagatccaggtctggtggccatgatgctctgggatcctaattctgcttctaggtacaacctgagaatcacaagcggtgtggtggtgtgtcagtgtggcctgtccatcccatctcatgtgagtgttccacacacagatttcatgatacttcttcccacatggatctactttcttgaagatcctccagtgctgacttggagcccattgtgcatatttcttcccagttttatgttcagtggtgtcacattggtagcttcaaatcagccatggtgagaatatctatggcatgaaaattggcaaacagtacacatcagagcctttagggccctggagagccatcaccgcttaacgtttttatggagacctcagcttgggattggtaacgcctgtatctgacgtttcataaaaattttctatatatgaagacatacctaattcagaatttaagcttcagtaatttttttttttttttttttgagacggagtctcactctgttgcccaggctggagtacagtggcgtgatttaggctcactgcaacctctgccttgcgggttcaagtcattctcctgcctcagcctcccaagtagctgggattacaggtgcctgccaccacgcccggctaattttttttttatttttagtagagatgggttttcaccatcttggccaggctggtctcgaactcctgacttcgtgatccacccacttcagccttccaaagtgctgggattacaggtgtgagccaccacgcccggccttcagtaatcttaaaatacagaaaaagcccttttatctggcatgatggggactgcaagtttgccagttaattgagcgattggttaaagaggcaaattataaaaataaaatgttttatggtaagtttcaaacacataaatttatttgccagcctttgagtggggccctgctgattggagagctgagtcacctgttttattttttattttatttgagacagagtctcactctgtcacccaggctggagtgcagtggtgtgatctctgctcactgcaacctccacctcccgagttcaagcgaatctcctgcctc[134 bp omitted]tggcctcccaaagtgttgggattacaagcgtgagccactgtgcctcgctgagtcaccttttttacataaacaacttctataatacatagtccagagtttccggttttaattccataaagtggatcaagaaactgagtatacaacttaggaatttttcctccccatcttttacctaattctatagctctttttctttctttcttttttttttaagcagctcatctgtttgtttcctaaacattctacttatcactataaaaataaaacttattatttacataataagtaattagcattactgagttacagtaggaagttcaagtaacccaagcagacccgggagcatatactgctagttgttggtaaggatgcactcagctggtgggggcagaggcagagggaggctggaaagtagcctacaatctctgagcgttcttcctgccatgagtggccatcagtgtgtttgacagcaggagtagagggcgttggttaatctggagaggcagttaaatggagatgggttaagagatcttggtacagtcatgggcccgagtgtctttaaggctccaaggagtcaagccatcacagtgagccacggttatattggttggcatgaggaatgaggattttccatctgttggctatcaagtcactgagaggaggttgaacttttttattttgtagtcttctgagttgacagagcagaagcttcgtgcctgtttagagggtagtataaatgagcacagtgcacattgtccccacacacctgaattttcagtcactggaggaacagaagaaaagtccagtcttctcatgagctgtctggtaagcgtctcctgggacccactctgtggtaagagggacctgtggttggttttattcccaccttgatagaaataatgacctataaacaggtaaatgtttaatgcagtttattatctgaggaatttacctgcatagaaaagtgaaggtaacaagtcatttagactcaaaggccagtcagaaagaagggaagaggcagcatgggatcacggcaagaggattggtctgggagttaggacgcctggctccacacctgctcttctttgatcagtagtagtggttttggattcagctggtcatttcatagtcataagacccagataggccatgctggcaccacttttgcggaaggaaacagggcagaagcatagcagggcagcattaggtttgtctgtcagtggagtttttacagaggtccaagggctattcgctaacctgagtgacaactgaggtgtgagggccaggaacacaagtgggtaagggaaccacctgtcttagaagcgtgctataggaaccaatatctcttataatccatgtcctttccatatatgtgtatgtatgtatgtacatgtgtatatatatcacacaaacacacataaaaccaatatgatacgtattattattgcttttagatcccaggcagggggagccttgggattaggagcacactgtacttcaggaagttcatagccatggctttctactgggaatttagaattccttcatggccctgtcattccaaatgcagttaacctacagaggtcatttttattataagcagcattgcctggtaacagccatttcacctttatcaagtttcttccataggtattctactcattcattaaaaaaaaaatgaattgaggactcattaacattgagaaatacacatctctcacagagctcaagccttgggttggtaataagagaacagaataaacaggcagtaccctggagagctgtacaaggagggcttatgggagttcagaggagggtgatctcctttatggtgacaccttcctggaggaggcatttaacttggccttgaagcatggaatcgatctggacagacatggagatctggtgagttgtgggggtagagcttaagtggaagatccccacatagaagaacaaggcagagaagcaggaaactggagtatatacaaagagcatcttgttctacttagctggagcattaggttcatgagggagaggatagttcctgttaggaataggaaacagattcagagaagtgatgtaatctggccaaaattttactactaataagcgatagagctggtgttagaccccaggtctttgtggttccagtgcccctgctgtttcctgctccaggctcaggccttggtggaaggatgccattttccatcagcttgtatggaaagagacatagcaggtgaaagtttaaataaaacccctcactacttcctgttgactacaagcatatgttcccttctgttccagctatccagcactggtagcagatgctcaaatatgcagtgctttcaggcctctgtgctgttgtttaggctgttctgtctgaatgactttgactcctcccactacatttaaggatcatttgcacaaatatttaccaagcactacaatatgccgtgta[143 bp omitted]tgaaaccccatctttactaaaaatacaaaacttagctggacatggtggtgggtgcctgtaatctcagctactcgggaggctggggcaggagaatcgcttgaacccgggaggcggaggttgcagtgagctgagatcgtgctgctggattccagcctgggcaacagggtgagattctgtctcaaaaacagaattggtggctgagtgcggtggctcacgcctgtaatccccacactttgggaggctgaggcggtcggatcatctgaggtcaggagttcaagaccagcctggccaatatgatgaaaccctgtctctactaaaaatacaaaaaaattagtcaggcatggtggcacacacctgtaatcccagctactcgcgaggctgaggcaggagaatcacttgaacccaggaagcggaggttgcggtgagcagagattacgccactgctctccagcctgggcaacaagagtgaaactccatctcaaaaaaagcaaaacaaacaaaaaaagaattggccagcctgggaagtccattcctttggagtctgtgttaccattctcaataaacctaatgagggctggcagaggggaactggccagtctctccttgggctttcaccgtacctcatgccatgtcacctgtaacagtgttgtagttacctgcttatgtctttgtccttgagggcaaggcccatatttatttttatttccagtgcttggcatatattaataaagaggtgcttaagatgtttgtacaaatgagttaaggtggagggaggagagttgaggcacaggtcagctggctttggcttctgtcttcttagtaaggtgaacagtgagtcatccacacagattataatggtagcagagctggagtctacagctccttgagtatgaaagtccccttgagtgtgaaagacaaaatgctggtcgggggaagagaaggggaattaaaaggtaagtggaagatggcctaattgccaagtgtacagcttcagctcagcatataattgttatggaccccagttatccactcacctaaccgtcagtgccctgtggctcagagcagcagtgaagctaagtaggaggtgaggtttggaaggtgagtgctgtgcagcagtcttggagatcatagttgacagtgccggctctggggtgggcaggaagaccattgttgggtaagtgaggggaggtgggggtcacagcaaatatgagaaacacagccaggcactgtggttcacacctgtaaccccagcatttaggaaggctgaggtgggaggatcacttgaggccaggaattcaagaccagcctgggcaacatggtgaaaccctgtctctactaaaaatacagaaattagctgggtgtggtggctcgcacctgtactcccagctactcggaaggctgaagtgggaggatggcttgagctcaggaggcagaggttgcagtgagctgagagggcgccattgcgctccaggctgggtgacagcgagattgtgccttaaaaaaaaaaaaaaaagaggagggggaaagacaaaattgtattctgtaggtcttgagttcaacatttggaaaggtagacatttggaatgctctagttccactagacctttggttttcacttaagggggaatcaaggaccattgtgttagaatccagtgaggtcaggacgtagggacgctcaggacagatggctgaggatgtgttgaaagataggggtgggttacagaagattgcactctatcacaagacgaggaatgtttcggatgtggcggtgctcaagtggtggtcctgggatggaatatgccaaaccgcctattagcagagttacagtgtcttttagagaaagccaaacatattacctgtggaagtggtaagaaacaagagtaacccacttatgcctactgtttaattattggaacgctaagcctgtgggagttattgatcccctactgctcaaggtcatcgccaaggtctgatttttcacacaaaaaaatttgcaacctctggcataaatgggttaaggacagactggattccttagcatagtggagaggctgagccacccaggagtcgggaggcagttttacactcaggtgcttactgatcatgtctttacatgttttctgcccgtactgatcatgcatggtttgcacctcccctatgatacatacctgcttcaatcttgtgtagatttggagtctcatcttcctgctgggctctaaaagctccaggctatcaagagtttgaatacaatctttctggtcagtggtttcctgatggtgaggatgtttgattagttcatctacaggatttgatcttagcttgaagactattgatgctgatggttcccagggcagttgtttgaaggctgcaggacagaggtccagcaatgccaaagaggggcggtcatcatgacaaactacactactgaactaattgaaactggactcaggagacctcatctaatgtgtagaattctcattgattacaacttttatcagatatctttcatgactagaatacaatttaagctaattattttcctgtttaaacctaggcctgtgatacttgggctgtgatcctctagagccagcttggactcacatcattctatggggttgaagacaactcattccctctgaggagccttgtacatacaagccttttatttataacttattttgtattgaaacttttaaacaatactgaagaaaaaaaaacttttccgacatctgttcttggtcttttgtgacgcaggttgaagggggaggaatagaaaaagacaaactgccttggaggagataaaccaattttatgtctatcatgttatacaaaaatctagaaataatagatttgtacagaaaaaaatgataataaatgagaacacaaaacatataatttaaatttggtattttttcccccatgatattaggatgataatcatttcaaagcacatgtctagcttcagagtaggatttgttcactggccaaagcctgccatgaaactatggctttcagcatctgtctgctctactggctcttgacaaaactcttgaggtcttcaagaaaagtaatgtactcctggtgctccagggctgtgctgagctccaccagctcatctgcaaaagtgttgtccacccctcggtcggcaaggaaatccattaggtggtcatataaggcctgcaaagaacaatatttactagttaaaaaaaaatctgtaatgaacattaaaatgcttttttctccccttgaactaggacccttccttccaaggcccaaaaggttcccccaccttatcaagcactcacccagtccaaggaatctgtgttgagtgtataattagtatccttccattcagactcgccagtggactgaaagctaacttccctgatagagaagatgtcactctcagcctcgtcttcttgtccaacctgagaagaaacaatattgggaaactgaagggttctccaggacaagctagactcaggggaagaaagggggccactgacagcatgaaactcatcaggttttaaccctcttccctcactccccacctctctccccctgctgggctggtctaagctagaaaagtgtttaaatttctgctaaaatagggacaggaagttcccaagggacacactgttccccaggggtgccaagaggctagcactccatcctgcatacctcatcctctggataatgacagtccaacacaagggccttcttgccatcatcattctttataacttcaaccacgaaattgggagttgatgtcagttcaggctggggaaacaagaagtcaatacatgctgctgctggaaggagatggatggctggatcaaggatctctgttcagagtgtctgatggccaccactattaggatattatgtagccatttgaatagtcttatgccatactattcccaaatgaagagcttgatctcacttctgttggcaccctgcttggttaaataacacactgggttttcagttaagaaatgtggataccagcctcagctatgtgccaattaactgagtttatatcagtcccttaacattccaagccttttcctccacccgtacactgcaaagctttcctaaagtttcaagatctctttccagcttgactgttccaggagtcttcataagggaccagggtcaaaggctggggaacctggccatccttatggctgaataacagcagcagcttttcctctgatgcggagctctgggagcagactgggtccaacgtcagggagatgctagttggggtggctgggaaagcagcacaccagagagctgcgccgtccacaccaggtcatgacccaacactgtactgatggctcttgggcagaatgtctagggactctgtggccctcatactggctggttactaggctgggcacagcacttcctgaaatgtttgaaga[134 bp omitted]cctctgcctcccgggttcaagcgattctcctgcctc[134 bp omitted]gcctcccaaagtgctgggattataggcgtgagccatgcgactggacttagaggaattttttttttttgaaagaccaaagaaaaacgctcctcctctaagccccaggcacagcctgtcagaactgaggtaaaagctgattatagtattagcttacctcctgttcttcaaccttctgcccttgcgagggttcctcctcaccatcaaatgttggtgggatgctgttgttaatgttgaaagtgaccgtgattctaaaacggcaagggaaaacagacaaggcaaaacagacaaggcatggttttaaccgagcaggttaacacataaacatggaaatctgctacagttaaaaaggcgtattgaaacaatgtctctgtcctagctggctgaattatatgcagaacttcaaactaggctgggtgcctacatccaatcctgagtgactcagcaggtctgaagtgtgcctaccatgtaccagctgctggaagccaaagctggcctcagtttatctcagccaaacaagtcatgcatgggttactcccaacagggccagtaccccagggctcactgccatgtgctgactgggcatctcatggccacagccagctgacactgcccaccctggtctttccagggaacccttggtcaaagtaaggacctgagaggctggtgagatggaacagaagcccctttaagagactttccccgtcagaaaatttgccctgcaaggaaaggaagaagcgatggagggtgcctctgctaaacaccgagagcagccctggaacggggaagggaatgcctcacaaagaacaagggctgtagtagagactcatcccttagagtacttgtgggaagtttcataatcacaaagcaggccagacacaccaactagtgacaattttaaggtgcaagaatccacacctgacaaatcatgttccaaagtttgagtcaaaattcttgggacataaggtttagaaccaaaactgctgggctatg[141 bp omitted]aaactccatctctactaaaaaatacaaaaaaaaaaaaaaaaaaaaaattagctgggcgtggtggtacgcgcctgtaatcccagctactcaggaggctgaggcaggagaattgcttgaacctgggaggtggaggttgcagtgagccgagatcacgccactgctctccagcctggagacacagcaagactctgtcagaaaaaaaaaaaaaaaaaaaagagtacatgaagtgccgccctccacttgtgctaactagctgctctgccaggaagccacctttccatggcaacagaggcagtctgaggttgacaaaatctgtctaattccaactgtgctgactaagctgagctcctgggcacagaaattgaatgacgttcatcagagcattatttttaatggcccccaaatagctatgaaaaccttgcgcaaatggtgtttaggtgagattacagaagacacaattgacctgtgtagggcaaaaacacactatgcaacaggcaagagaatcaggaccctacttcacaccatattcaaaatgaatcacagacctaaactaagagctaaaactagaaaactttgaaaaaattaaggcatacatcttcacaaccttgggttaggcagtggtttcttagacgtgacactaaaaaagcacaagttgcacttggtgaattagaagcaaagtaaaaaataaataaaaaagcacaagcgaccaaaaaaataggtaaactgaacttcctcaaaattaaaaacttttgtgtcagaggacattaccaagaaagtgaaaaggaaacccacaagatgggaaacagtacttacaaatcattaatttgataagatagttgtacccagaaaaacttaacttttacaacccaacaattaaaaaggtaaatagggtgggcagggtggctcacacctgaaatcccagcactttgggaggccaaggcgggcggatcacgaggtcaggactttgagaccagcctggccaacacggtgaaaccctgtctctactaaaaatacaaaaattaaccggacgcacgcctgtaatcccagctaaggaggctgaggcaggagaattgtcagaacctgggaggcagaggttgcagtgagccaagatcgcaccactgcactccatcctgggtgacagagcaagactccgtggggttggggggggaagctacaaattgtatgactccatttatatgaaatgtccaaaagaggcaatcccatagagaaagtagcttagtgattacctggggtggctacagggaggaataatgagtgactgctaataggtattgtttggggatgacaacagtgttctagaattaggtagtgataactgatgcataattctgcgaggactaagaaccacttaatttaataaacttcaataaatgggtaaatcgtatgccatctcaattaaatctcataaaagctgtgatttaaaaaaattacatacacatcataaggtcaattatgaaggaaattcaatttatttatttattattgagatggcgtcttgctctgttgcccaggctggagcgcggtggcgcgatctcgactcactgcaacctccacctcccaggttcaagcgattcccctgcctcagcctcccgagtagctgggactacaggcacgtgccaccatacccggttaatttttactagagccagggttttagtgttagccaggattttctcctgacctcatgatctgcccgtcccaaagtgctgggattatgggtgtgagccaccgcgcccaggctcaatttaaaaacctggaagatgccaaatgtttatctgtgtaatgagattatggatgactataatgcagaaaagtgtaaacactttaacagtttaggagatgatgggggagctgacttaggtcacaaactccccacctctgatggcagcccttactacagtgtaaccccatcctgttacatagaagttacatatttttcattttcacccatactaaacattagagagcagtgtcctattttatcagggctgtaaatcagagatcaaactgattctgccagtacttttttgcactacatttttgtctccttagtaaccagcccacagcaaatttgtgttcggtgaatggactgcctggggcttacgaagttgtccaaatgaatccttcactctcttgaaacccatttatcaaagtatccacacctgaactcaaggctcttctggggatgacccaggatgggtcctgcaaggttaagggagttgctgccctgggatccccagaccagtacttacttttccccggcaactttccgcactaatttcgcttctgtcccattcagttccagctcccaacctccagacatcttagggagggttttatgcttctgaatttttctttcctccttaatttcatcactcaggaaatcaacaaaagctttgtctcctagaaaagaaatccagatacataaaaaggaaagccagttagtctaaaacataaaactattacccaggttattgcagccagaaacctggactgtttctaatctctctgctattacggttactctagaagcctgtttccttatcggtaaaaataccataatagtagtaggaagctgagcctgattctggaaaagtgatttccaacaatgaacgcattaccactttccgctataaaccaggagaatttccaatcctcttccacttgccaaacgatataactatgctattttcaaccacgaccatgggccttcccaaaggtccactttcgatagaataagactaaggaaaaaggtaccctagtatttaattttattcaccccctaccaaaagaaaacgaaactgctggataggggaggtgggggaaatatgatcatacgtgggtttagcccgctggttgccaatcaatggaaaaatgtcccagacctcagaggtcggttgcaggccctattcctggtctacgttttccctctgttgaacgcaaaccacacccccggcccgctaaacctcaccgtcggtgtgcagcgagccgcagccacagccacaggcgcagggtccgcgaggccgcaggaggcccggccgccgctcggaacctgcgcgcacgctgagcagcccgaagggccgggtgcacagccggggtgccggctgcaggagctgccggaaaggcgaggcgggcgcggcagcgcggaggccggcgacggaggagcccagcacacggggcacgcagcgcagcagaggcagcatcgcggaaacgactgcgaacacgtgcagatgcaaaggacaacccaggcctaggcgccccgcgacctgaggcgccgccggaagccccgcccctgcccggaagcgcttcccgcgccggcgctctgacgacctaaggccagcgggcggaatcgcgccctctgctggagactccggtgcagcccgggaagcctcgaatccggattccggagctttcttgctgcgctgccgagtccgctgtccgaagctgtttaattccctctagtggccgcttacccactttccacctgctgttctcaaagcacgcaaggcttttgggctgcgtggaatgcactcttgtctcccgccagctctcaccagacccttccacggtcactttcctctaggaggctgtggtgttatgatatatatatgtattggttttcatccacagttcctgggtcgtaactcctatagcccttgttacaatgttctgtgataatgttgggtgtgttaggcctcaggaaacagactctccccttctcctgccctccttttacctgccccaaagcaggactctaatctccttccacatttctgattatgggtcttaagtcccttcccagagaaggtcccaccatataccctgggggaagggatgctgatgtccagaagcttccataaaaacccaagaggagagggtttgcagagcctctgacagctgaatacgtagaggttcctggagggtggtggcccagggtaggcaaggaacctcggagcttcttccccattccccaccctgctcatctcatctgtatccttggtcatatcctttatatgaaaccggtgaatgtgtttccctgagttctgtgaactgctccagtgagttaacataatccaaagaggggggtcgtgggaaccccaacttgaagcgggttggtcggaagtttcagaggcccagacttgccattgctgtctgaaggtgggggcggtcttggggactgagccctcaacctatgggatctgacactatctccaggtagatactgttgggattgaattggaggacacccagctggtgtctgctgcttagtgtggaggggaaaaacccaaacctttggccacataagtcttctgtgttgattgttgtgttgtgagagcaaaggaaagtctgagggttttcctgaaagaggccttctagaacctttttttccaccggctcggaactcatgcttgtgcgcacccagcccatatgcttcattctcttttcaacaggaacctcctagcgttgctgctttaaccaggttaaacccaaccagactgtgacatcctcaagggcaggatccatgattaatttttgtgaccttccctctctgcacctccaaccttgcatccaagttctaatggaacatcatttttctggggacaagaagccagcttatatcatttagataagtccagaggcttccataaaaacccgaggacagggtttggagagcctctgatagctaaatacatggaggttcctggagggtggtggtccagggacggcatggaggctgggagcttcttccccattccccaccctgctcatctccttatctgtatccttggtcatatcttttgtatgaaaccggtaaatgtgtttccctgagttctgtgagtttctccagtaaattaatataacccaaagacagggttcagatttattaaaaatcaacaatcctaccttcccaggatatacaggacatataagctactaagaaggtatgtcttactaactcatggtaagactaacacttaatattttctaaataattttctatgaataatggaaaagagatgcaagaaacaagccacacacatcatatacaagattcatttttaatggatttgatcgtcgggtgcaaatttgagcattatttacaagagctttctgtagagttatttctgttcaaataaaaccagactctcaaaatacaacataagcctgaacctacttgatttttttttctccctctagttaccaaggaatatcgtatctcagatgcatggcctactatcacactggtctttaaagaaaaaaaaaaatgcatggccacagttccaggcagttcctggtagctggatttagtggatttatatatgacagtacagtacatcatcagtttcacccacagggcagaacttgcctccattcaggcatctctttacaactggcagcaatgcagcattaagggtttttagccaggacctgctgtttgcagtcctgccccttgtagtgttactctgggtgttgcacactccatgattactagaagacaaacacctgaggcatgcaatctgcttggagtgcatctatttacatgaagctgctcacgggagctggtgattcttccagatatgggtttcgtaggttggcaaagagttatcacaccatcagagattttaccaatggaaagagagtagctgaagattatattgcaatgttattgtgaaacatttaactttcttaagtttaaagtgtactatctcctgcagctcaatataaacaacgatgtatttctttgtagcagtatgtggagtcagaatgggttttccaatctgatttaatccctgagcagctatgttaaaagttaactttttaaaaaagcccaataaaaaactaaatactgtattaaaactctaccacaatgttacagggataaacttatttctgtacagaaacattaaagctacttagaagctgtttacatcctttgcctctcagaaaaaaaatatacatttccggaaactgttcaggtacttaagctggacataaattaccccaagttttttctttttctttctttctttctttttttttctgagaccgtctcacactgtcggccaggctggaatgcagtggcgtgatcttggctcactacaaactctgcctcccaagttcaagcaattcttgtgcctcagcctccccggtagctgggattacaggcgtgtgccaccatgcccagctaagttttctatttttagtagagacggggttttgccatgttggccaggctggtcttgaacttctcaagcaatccacccacctcagcctcccatcccaatgctgggattacaggcatgaggtgatccgcccgccttggcctcccaaagtgctgggattacaggtgtgagccactgcgcccggccaccccccaatttttttttttttttttttttttttaccagcactatgaatgattaaaaatacaatatttttcttactaagtaggactaaacattctaatcccctactggaaaacaaaaaacaaaaaacaaaaactggaaaacttttcagaaagtcagcagtggtaacaagtcagtaagtggaagaactggttcaaagtttaagaattcagtaagataaggtatataggagctgtcagatcttcttttgcccacgtataaccatttctgacagacagccctaaacactagctgagagcttgactgcacaggaccacggctagtgttggaaataaagactgagccggacttgacatacacaactccggacagatgggaccctggaatggggctgctccatcaggccacagcttccagaaagagagcatccatgatctctgaagagcctcttgggcagcttggcccctggttataactatgattcattcattaagaaatgacaaaacaccccacagatgtatttggaccaagtaagcacaataaaagagctaaatcacggcttcttctagggcaaaatattatctggggaaagattacttgcttctgataattaaatagctaagaggaaccgttagtgccttttctctgctcagaatatcagaacaggaacagactgtggatatcctccaattccctctgacaatgagggttagagagaggtgcctagcagttagaaagcagcaaagccagattgtcccaagtccctacgaagaaggaaaaaatatcatagaaaattaataagatgcaagaataagtgttacagctctagctcttttagaatttgtccagcaggtcttctagacttcactgaactgccccccaccccccccgcccacacaccaaaaaagatacaagaatgtaagcccagatgtggtgtggtatctggcataagccaatgttctctgggttctaggtacccctctcccctcccccacccccaccccctctgaccaggggactgcccgaaaagaaacagctgaaatggtacacagtcactcctcatgcccgcatgttcactggtgcccagttagagagaaaaatggcaactgtgtatgtgggagtcacctacacacacaaaacactgataggtcagtttcccatgtctacacgtgacaggattcagaaggtacaaatcaaccttcacccaggaagcttacatgtctcctgaaagcactgacagggtcacgcactgaggaccaggaggctcctttactggtctctgcttggagacagacacagagtggtccaccctgagacacaagcgttcagtagggatcgccatcccaggaggtacgagataacagcacctccctctggaaacttctacagaagtcagttttgttttctattttaaaactgcattcagagagacattaaacaagaactaagggcaacatccaagctccgcaacctcctgtggcccttccagaaaatctccctcagtcacaagaacttgggatattgctgtacttcacatcatatggcaagcagtaacattcagcctaacggctcccaactcactgtacgtgtgtcgtgcgtgctccaggcatagttctgggtactttccattccttttctctaaactttatgaacccaattttataaggattattattattactcccatttggcagatgagaaaactgaggctcaggtgttaaattaagtcaaagtcacccagtaagaaccaaaagcataattttgaggtttccaggtacaaatgatatgtccatgtctatatggttcagtcccaggagttgagcaaagatgctttcacgctcctggaagtcaggcaccttcagctgattccaaggcttctctaagcgccaacctggaagcctgctgtaaggacaactgtagtccaagctcccagggaccagtgattctggcggcatcctggggcggctcagtttctggcggttctcagcttcctcctaaagtactcaggggcagcctcgtacagccactgtgcatctatgacgcagaggtcccgcatgtagcacttgttggtgtagagcagctcagtgtacacgacgcaggccggcttgcagtggaagaggacagacgacgggtggatggccactggctggtgggtgtccgtggtggcataggtgccatctggctgaagctcggcggtgctcatgaagaggctgtgagccaggcagcggcggacactctccacgtctcctcgggatgatgcgattggcattgacatctgtttcgggagaaagcgaggaatggagccgaccccacacgtaaacactggtcagcactacacagcgtgttggggcaactggacccactggggcaaaagcagcccacattgtgagcctaacgatgtggattctgacattcggaggtggtcaccaaggatcagcaaggtcaggggaagaaggcccagctggaggagcacggaccagaaacagggaaactaccgcctgtgaaggtagggctgggagggaggtgctcacattagccaccagaccacaggcaggttgggtgacccacccctcacctaaattccatcaggacggcccggaaaggaaaggcccttccctctcgctttgaccatctcaccatctcctcactccgattcacccacctgctgctgccaagctaatctacctaaagcacaactcgaatcactcttcatccactcaaataccttcaacaatgtctctactgctccttgcaaaacaatgcaaacttcccgtggtgaagccacgaaggagccaccctgagctgctcgcctgtctttcctctcaccgctctttttctttctttctttttttttttttgaggctgagtctccctctgtcacccaggctggagtgcaatggcgcaatctcagctcattgcaacctccacctcccaggttcaagctattctcctgccctagcctcccaagtagctgggattacaggcgcctgccaccacgcctggctaatttttgtatttttagtagaaacggggtttcaccat[140 bp omitted]ctgccttctctttcctcgccccgtttcatgattcctatctgtgccttcacatttgctactcttagtagaaatgctgcctgtctcatcagaggaaatgtcagtcaccagtcaatgtccttgttctactgctcttgatgagtggggcatgtaacctacgcccctgggcacagatgaacaaaccagtggtacacacacgctggacctaagctggccagcttttctcttccaggcatcttttaggtttgaaactggaaaacttgtcaatctctgctgggctcttgagtggaggggccatgcagagaaatcacttccatgcggaggtaaaggtgagaaaagggaaggaggcacgcagagggcactcaaagcaagagaagcagcaggtccagagaaagtggcgggcctggctcctgcaggctttttctggttcctgtgactctatttcctgcctatcggttctcagagatacctttccatccttggaagaatctttattttgtcctttatgatggctctagggtttctgttgttgacaatcagctgatctatgcctgaagaagatacttttttttaagagacagggtctcactctgttgcccaggctggagtgcagtggcacaatcccagctcgctggcaacctctgcctcctgggttcaagcgatttttgtgcctcagcctcctgagtagctggggttataggcatgcaccaccacgctcagcttagttttgtatttttagcagagatggggtttcaccatgttggtcaggctgatttcgaactcttggcctcaagcaatccacctgcttgggcctcccaaagtgctgggactagaggcataagccagccaccacacctggcctggaagatactcttttatctccttatctgtcaagatctagctcagttgtcaccacctccaagaagccccagaggctaactggtggtctctccttccagactatcagctttaccactcactggctgagtgatttggggcaaattatttaacctgattaggcttagtttcatcatttgtaaaatgggaataacaaaagaatcaatcttataggttgaaatgaggattttatcctttgggttaaggtctgagttgaaaaagaaaaaaaaagaaatgaggagtttaaataaggcagccacataaaaagtactcagaacagtgctgaacaaacacttcatgaatgatagtgattattttaatttgatggcctcctggcatgagtgtatgtacgtcaggtcaccatctagattattacttagttactgagtaggcatgtctgtaaagtctcaggaccttaccagtgcctgacatataatgagaggtatccctggccactacagggtcctaaattcacaactaatagagaagcaccgtttctactgtcaatgataaattgagaaaacttatgaagccaagagacagactggcaggaaactgttcaaatacaaaagcagtttaaaaaaatgtgtgaaagacagaatacaataggctactatgagaagaaacagctctagtgccaaccgtaggccgttggcatcagacacaggcctgggtacaggctgtgactgtctcccagcagcgtccgcactgagggggcacaagacattcaccacagagtactcaggacagcagcaaacacacggacactgtctcagtgatcaacagcaaaagaacacttccgctaccctctatctctgacataaaatgtggagtgtcatgcgagcattaaatataccatgacagctctttaaaacaccatgtactctaagagggaataaaaagctaatataaaactttgtgggccgggcacagtggctcacacctggaaccccagcactttgggaggccaag[184 bp omitted]aatattagccgggtgtggtgggtcatgcctgtagtcccagctactcgggaggctgaggcaggagaattgcttgaacacgggaggcagaggttgtggtgagccaagatcgcgccactgcactccagcctgggcaacaagagcaaaactccgtctcaaaaaaaaagaaaggaaaaaaaacactttgcggtggacactttggcaatatctaacaaaatccaaattcccccatctagaaattcattctgtgtgcaccacagcacatacggaggatggtcactacaacagaatctaaatgaccattattagaggcttaaataaactgcactgaatacaatgaaatgctatgaaatcactaaaatgaatgagctagacacatgcagcactgaaagcccagccacaggaaggatttgagaaatacgcatgtgaggccaggcacagtggctcacacctggaatcccagcacttcgggaggcc[135 bp omitted]gaggcaggagaatcacctgaactcgggaggcagaggttgcagtgagcggaggctgtggtgagccaagatggtaccactgcactccagcctgggtgacagagcaagactctgtctcaaataataaacaagaaagaaagaaagaaagaaatatgccatgtggaagaaaggaagttgtggaacatgtacctcatatgcacgtatccgttatgtgtgtgctcacacacaggcacagagacatgcacaaaaacatacatacacagaaacaaattctagaaggagctaccccaaactgttaacagtagttatctctggaggggcaggattatgggagacttttaaactttctacattataaatcactattttctgcattgtgtcaaatactatacacaactttggtaatctaaaaggaaataatgcagatattcatacttaaaaaaaatcttatgaagaattctaacactggaaaatgcttataaagattataaaaccaaatataaattatacatataatttactatgtaaaaaaatacaataaaaactaggctattaggaaataggctaaactactgaattgtggaattgtgggtaacttccttttttcttatttgtgaaatttgctacaatgagaaatccttttataatcactagcaataagcaacttcaaaatttctaccttgaacaaagtgacagctttgtcacccacagaacactaggaccagacgatacctttaagcagatgtccctcagctgtgctctgacttctgctaccagcgtcatattcttgctgttgacaaaattctctttgcaccaatcctgaataggagaaagagtgatatcacaatccactcattcaccatttatatgttcacagagacggggtcttgctctgttccctaggctggagtgcagtgatacaatcatagctcactgcaaaccaatcctcccacctcagcctcccagatagcttgaactatctgcacatgccaccatgcccagctaacaatcctctcatctctatagagaaaatataacaacatttttagaacacagttgaattcagagaaaaaacttcaggtgccaaaaagaaacgtaggaaaatatctttatatcaaaaaacatgaactataagaaaagtgttaataatttaaactaaagaaaaacttgaagtttcccagattgggatatttgtctcatcatacccaataaatgattagaatctctagaattgattttaaaagttctacaagtcattaagaaaaagaccaacgacccagtagaaaaatggacaaaggatatgaacagacacagaaaacaaaacagaaatgcccagtcaatttatgtaagacttctttcttttttctttttttggagatagatagagtctcgctctgtcacctaggctggagtgcagtggcacgatctcggctcactgcaacctctgcctcccaggttcaaatgattctcatgcctcagcctcccgagtagctgggattacaggtatgcacaaccacgcccggctaattcttgtatttttagtagagacggggttttgccatgttggccaggctggtctggaagtcctgggctcaagtgatccacctgccctggcttcccaaagtgctgggattacaagcttgagacactgtgcctggccctgggcaagtttttcaactgcacgaagcttcgtttccatgactacatgtttcatgaatataaaaaataataattatagtgctcatttcttaggattactttactgaataaatgagatcttacattaagaagtgcttagcatggggcttggcacagagtaagtactcattcattggtacgcactatcattattagacatattacttaatcaagttccaattaagttttgatgggttgggagtcacttaagtcttgttgacttaaacacattcggaacagagaccagaatgacactgcttcggtactgaagcatttctgaaatgctgtctggctttctttttgtgattctttagataatttagccaaaaagggaaagcgtactttttgcacggcttcagtagaaaaagggaagcacatagcagagacaagcagctatcgctggagaacaggtgcaagacaaggctcaccttatttccgcctaggtttttgaaggtccgatagatattgagcagggtcatgtgatccccctcgctggatatgaacttcttgcggaccccttgcacttcctctcgccgggaaggagggttgtggaggacgctgtccacagacagcagggagacaatggtcaggatctcctctgtacagtggaatttgggggacatgaggatggtctgcaaagcaaaatttaaaattgtgtaaacccagctttctcctagctttagaatgcactatttctgtacattgcttttgcagtttcccttctaaggagttaaagggcaggtatttctaaaaccatggcgatgtacattagtgttatttcactctttaatattcaataaaacaggtgactgccttccctacagagttccaaatttcttgtgggtaggggctcttaacttcatctctttgaatcccacactgaacatgaatcagggctatttgcaaactaggggttggtaattatgtaagagaaaaagtgagattaatctagaagcactgggtagatggtactactttgggacggttaactgtaatgtacagaaagaggactgaggagagggtatcatttactttggcaaatttgggttctaaaggaaatgctgccatctttcttcccattggagtcagggtaagctggtcatccttatgttcaagagcacctaacaggtccagttgggcaatggccgcctgaatgtgatctaaagaaacagagacataaaaaggagccaaaagtccaaaaaaatgaagttgcagctagttcagtatttctgggagcttctgataattctacatcaaacaacagcaaaaatcataaccgccactgcccccttgacacacttgtcaaagaacgacatcactgtctttagttcaattcccttttcttttttgagacagagtcttgctctgttgcccacactgaagtgcaatggcgtgatctcggctcattgcagcctctgcctcctgggttccagcgattctcctgcctcagcctcccctatagctgggaccacaggcgcccaccaccgcgcccagctaatttttgtatttttagtgagacggggtttcaccatgttagccaggctggtctcaaactcttgacctcaggtgatctgcccaccttgacctcccaaagtgctaggattacaggtgtgagccaccatgcccagcctcaattttctttttaaatgacctgtaatttggcaatatgtatgtagattttgaatatacacattaaaagtgtaacatctgacccagcaatgttacacttacgaatttcacctgcagatacacatcgcacagagaccatatcgccagaaccaaacacataacagtggaaatagcagttgtctcaggggccagctggggaggctgggagacaaggggatgagaaggacattattactatttactattttatatattttaaactttgaaccatgtaaatatagtacctattaaagaataaaaaagcatttctaaggatgtagtaaatatatacatcccaataaggagtgatctgtaaaatgtattaaatgaaaaaaagcagtgtgtttctcattgcttttttaaagcaatatttatcaactgaaggatggataaatgcattttggtttattcacagaatggaatagcacttagtgtgaaaaagcatcagcacaaatatactatacggaacaagctgaatgaaaaccgcttactcaagaataactaacataaacttacaaacaacaggtggtttagggatacatacgcatatagtaaaacagtgaagaaaagcaaggcaattacaaacaaaatatggaagagtgggtaccccaaaagagtggaaggaggcgagggcaagtgggtgggggggactcctgggggcttcaattgggtacacaggtgttagattttaaccattccttacaccttatgtatcttcttcatttgtatgtaagaatttagcaatgaaagaaaaaaaatcaagcacagaacaata[135 bp omitted]acatagtgaaactccatctatactaaaaaatacaaaaattagccgggcatggtggtgcacacctgtagtcctagctactcgggaggctgaggcaggagaatcacctgaacccggcaggtggaggttgcagtgagctgggatcgcaccactgcactccagcctgggcaacagagtgagaccctgtctcaaaacaaaaacaaaaacaaaaacatactacagcaggggcttggtggctcacacctgtagtcccagctacttgggaagctgatgtgggagaatcacctgagcccgggaggttgaggctgcagtgtgctgagaatgtgccactgcactccagcctggacaaccagagtgagaccctgtctcaaaaataaataaataaatacataaataaaatcaaacacactacatatactcatatatgcatacatttgctctagaagtctactagaaaatggttccagtggttgttctaggggaaggaaactgtgaacctgaggatcagggcaggacccttgtatacccatcaactggtgactttgtgttttctttccttcttttttaaaccaattgcatttcttaagaaaagggggggcaataaaaagaaaaggaaaatggtgcgttgatgagaggccaggtgccaaagccaatatcataaatatttccaattattttcttcttctgtagagaaattactaatgaacaggagagatggatcaaattccagttaaaggcaaagaaatgtgatctttgcagtccctgtgctgataaaagtacaatttcattacatttctgtagtatcccaaggactcgcatgatgaccttcactggttccagaggtcaaggaactttattgatggtgctgatagtacagaatctatcgtttcatagctaggaacactggcgcatgcctgtggtcccagctacttgggaggctgaggcggggggatcgctggagcccaggagttggaggctgtgatggagcctgtgaatagtcactgcacctccacctgggccacacagtgagaccctgtctctttaaaagtcaatcaatgtatctatctatcatttcatgattttcagatgcttctctaataactaatgttgtcatccacaaaattaaataaacaaaaggagatgaccaatatactttatttttttggaagtgtccatttgttgttgtttgtctcctcacccaccttctgcaaaactgtggatttcacttacctggagatggcttcgacatgaagtcaaaggtgagcacatttgggactttcattgctagaagctgaagcatcacactggccaggttacacctgtgaagagcatgagaccagggtcatgacctgatccctctgccattgagtcagaacccctcatggtggagtgtgagtaaaaactgcagctctgggcaagcaggagagacatggtgacaaacagcagcagtgcaggagcaactggtgcctacctctggatctctggcacggtcatcttatcaaacttctcaaactcgtcctccgtgtagagccggtagcagatgccactgtcctctctgccagccctccctgtgcgctgccaagcctgcgtcttcgatacccgctgcactgctaacacctcaagaccactgtctggatggagagtgagccccattagtgcttcatcacatgaacaaactctttctacagtgtcgataaaaagaagcacaccagtggttctttcagcaacacgggggtccagaaagcctcaaggctagcacaatggacagcacaaaaccagactgctccgcagcggtttggccctagtgaaacaaggctttgccataagcccactgtgaaatctgttacaaaaacatcagaaaaacctcacgcatgcagcaaggggcgagaagagtagtttccgaggtcttgccttagatggtaggatggccaacccctccagtttgcttgggacagagggtttcctgggatgtcggattttgggtgctaaaactgggagtttcagcaaactaggatgggggtcatactatcaatcaatgactacgaaattaaatgcctcaaatcacttgtgtgctttatcctccctcccagttctgctgtaagacagaaataatgtgatgtctgttttctagcagtaaatgaggttcattttcttgataaaggtgtatcattagcctggcactggagacccaagctctttcacctacgtcatcacaaaaagatacacctgtggaagccaggaccctcaaatgtttactagagcatttcagttcaataattgggagcaataatttcagtggtctcaaatcctctgtggaataaagcaaagtataaaacagacatgagtcaagatgaccttaagttagcttctcactgcaccttcttaggagaagccagtgctccttccatgcctcacctcagccaggagatctggttccttcctgagaaacctgggagctcaaaccagccatatatatatagtttctgatgacaccctttgattgacacccagctgtccctggccttagagccgacttctgatggggtaccagaccctctgcccaggtccctgaccctgtgtgcccaagtttgctcaacctgggctcttctttcctgcctctacttcctgtctcacatacccgcctcaggactccttcgcggacctggagtgtaggtgatctcactcatggcgcctgccacctgaatttgttagttacaaacatgaaacactcaggggaaaactgtgggactacagtttcagtggctgctcactagacacaggagagacattcatgaactacaaattctcaccagggttatacttctttgctttaaccatgcccgtgtcaactacatattttattcctgtaatggttatggaggtttcagcgatgttggttgaaatgatcactttgcgatagccctaaaaggaggaagaaaaccaaaaagccgcattgacacacggatgattcagaagtcttcaaacatattctcaccattaacttccacaattcactcttgaccaacagaagatgactccattattaatggcagtcattaatattaatggttggtcattaaaccgggcaggggaaggggacgctgcagtcttaaaggtcaatttgaggcaatgagatgcagtggaacaagcacaggaatcagaagcaagtagatgtgggttggaatcgtggccctgccagtgacttactatgcgcccccttgagcaattgttacttcccttcttggggcctcaggatccccatgggatcataacctgccttgccggttcccacgaggatgacagacagtggatataaatgctagcacagtgcctggcacggcaaaggcacacaagaaatggcactatggacaaatgcaatttatgctggtccttagaagtcactcgtttaccttgcagctttggtttatactctccctcatcccaacaactgtctccctgctcctgtcacaggagcgctgcgtgtgtcaccgcgcattttattcctgcacctcctcagtgcgctgatctggcacctgggtatcccatcccatacaccttatctggagcctggtaacaggtacagacctcgctggtggatccgtctgggtgcccagaatagggctggacagaagaggtggtgcactcacctttggggccccttggaagactcggagctgctgtgcatagggcagggaggcgtacagaggaaggaccagcatcgcagggcagccgtctgggaggtgctttgcaatgtctcggcacgtcttgctcatggcttcgatctcctcctgcccagtgaggaacaccaggatgtcctgtgaagaaggggcttcctgtaaaaaaagtagagtgggtttactaggcattgatagaattgcagcttgcacagaaaaagacaatggtgattgatgatgtttcccagagttatttctcttaactatagaaatgtaaatgagcctaaaagttgatgtctagcttggagagaacccttaccagcagtgtgtaaatggtaacaggctgggtgtgatggctcacgcctgtaaacccagcactttgggaggctgaggcgggaggatcgtttgcagccaggagtttgtgaccagcctgggcaacgcagcaagatcccatctctacaaaacacttttttttaaattggtcaggggtggtgacacatgcctatagttccagctgcttgccactccactccagcctgggcgacagaacgagaacctgactcaaaaacacaaaaaacaaaactgtaatatataggagttagccagctatgtttataggccaagtgatgaaattttgaagggaaatcatcagattgatttttctaacaagaacaataccatgaaaagcataatcaggcaagcaaataaaatctgcatgaagcttcctttcttttataagcatcttgaaaaatgaagttgacaaaacagaaggaaacttggggaaatcctaatctatggaaatgaacaggcgcagccatgctggagaaggagcctttaatgaatgacgccgtcgaaagcgctttcacacgccccaaaacacacactatactcggacaactgcttgagatactgaggttaatggggttcctcactttcaaatggaacaacacccaagtgtgaatgacatacctaatgccctgatttttctttgatttctgatcagatacattaatttgtttgatgtaaagtgcttaacactttgggaggccgaggcggccagatcacctgaggtcaggagttcgagaccagcttgaccaacatggtgaaaccctgtctctactaaaaatacaaaaaattagccaggcgtggtggcgcacgcctgtaatcccagctactcaggaggctgaggcaggagaatcacttgaacatgggaggcggaggttgcagtgagccgagattgcatcactgcactccaacctgggcgacagagcaagactccatctcaaaaaataaataaataaaatgaagtgcttgatggactgggcgcagtggctcatgcctgtaaccccagcactttgggaggctgaggcaggcaaatgggttgaggtcagcagtttgagaccagcctgtccaacacagtgaaatcccatctctattaaaaatacaaaagttagctaggtgtgatcccagatactcaggaggctgaggcacaagaatcacttggacctgggaggtagaggttgcagtgagccgagctcgtgtcactgcactccagcctgggcgacacagtgagactccatctcaaaaaaaaaaaaaaaaagtgcctaatggcaaaataaatagaaaaaaattttaataattatatgtatatttatgtatatatgtaaaaatacgtattttttaatatgtattttttttcagcccagtattaacagaacaaatgtgcagagggatacacagacaggataaaatctaaaacagtcaaaacctcatgagtgggagaattcatcaaagccagtggtaacctaatgcaccagcagccatcattcatgaaaaattctcgtttgctttctgcagctgaacaaggcagacttcttccccaaacactatgaaaacgacagtaaaggccactgtcttagaaagaaaaggcaatgagagatgaggagtctcaactcattttggaagagaggggaaaggggctggatgacttggctagagggaggaaactacaaattatgttgtgggagagtgaaaactcagggattggttcaaagtctgagtatagagtagttaaagccttcagttccctctcctacccaggacggccaggagactgggaagccatgggtctcaccacgggaaaatggtgacaaagtgaagagtcaagatgacagctgcacaaaggcccaggagagccacctgccccaactggaacagcagcataaaggactctgaaaagacagactgtgcttgaacacagaactatacacgactggcatatgagatgttggaatatttgggagaaaatgagccagagctacccagaaagcttgcacaactgtgttgttcaagaaacaaggtacagggatgatggtgtgctactagcaatgtgtggtcataatattcttagtattgatactggactcagaaaacatcataataggccagacacaggtgtgcaagcatgtagtcctagctactcccaatgctgaggtgggaggactgattgagcccgggagttcacgaccagcctgggcaacacagcaagatcctgcctcaaaaacaaaaacctaaacaaaaacatgatagaactgtcaagaggttggagataaagggggttggggaggggcattctaaacttttgtcaccatggtaagaaattagcatatgatgcctgatacccataactcaaaaaatagtggtcaaagcaaggtagtttagaaacatgaaagcaatatgtagagattgaaagtaggtgccctaaacagcagaaatctgggatgttgaagtaaaaacaactgctattcttttattataaaccttttactataaactacttgactttttaaaactttaaatcccatatgcatcacttattttaaaataaaaattgactgggcacggtttctcacatctgcaatcccagtgctttgggaggctgagtcgggaaaatcacttgaggtcaggagtttgagaccagtccgggcaacgtagcaagaccctgtctctacaaaacataaaaaaaaattagccaggtgtactggtgtgtgcctgtagttccagctactcaggaggcaaaggtaggaggacggcttgagcccaggagatcgaggctgtagtagctgtgattatgccactgcactccagcctgggtgacagaatgagaccccgtctctaaataagtaaattaattaaataaaaagttattttaaaagtttgcctctggattttctcagaaagctaataggaaggtaaaaacattaaattttatacaaattaaacaaaagtgacttaatgattcaaatttttgaagtaaatgtttaataaaatgagaaaatatttttaaatattctcctaatatagtttaaaaaaaaaagaaactctaagttgcaacccattattgggctaatgtcaactttttctttttttgagataggatcttgctctgtttcccgggctggagtgcggtgatcatagttcactgcagccttaatcttccaggcttaagtgatcctcctacctcagcatcccaagtagctgggactataggcatgcaccaccacacctggctgattgtttgatttttagtagagacaagtcttgctatgttgcccgggctggtctcaaactcctgagctcaagcaatcctacccacctctgcttcccaaagtgctaggattacaggtgtgagctactgtgcccagccaacattttctttaaatgaggcacaaaatatcagagtaccctacatgtagtaaaagacacagtacttcttctttaaaaaataatttttataattttttttatagagacagggttttgctatgttgtcagactggtcttgaactcctggactcaagtgatcctcctgccttagcctcccaaagcgttgggattacaggtgtgagccaccatgcctggccagaagcagtgtttcatagacctatttcagttatatgtatagcgtacggggttgcaaaagaaaaagtacctttttttttttttttttgagacagaccctcgccctgtcacccaggctggagtgcagtggcgcgatctcggctcactgcaagctctgccacctgggttcgcgccattctcttgcctcagtctcccgagtagctgggactacaggcgcccgctaccacacccggctaattttttgtatttttagtac[152 bp omitted]ggtaagctactgctttaacatgaaaattttctggctcagtgtaagaaagctgctggtcagaactgaattatttttcttttcaatgaaaattagagatatcataaataaaggataaaaatccagacacagcaaatgaactccttattcattgttttttttttgttttttttttcagacggagtctccctctgtcacctaggctggagtgcagtggtgcaatctcgcctcattgcaacttccacctcccggattcaggcgattctcccacctcagcatcccgagtagctgggattacaggcacccgccatcatgcctggctaatttttgtatttttagtagagatggggtttcaccatgttggccaggctggtc[132 bp omitted]ttttcttttcaaggctcaatgttctcactaccaactgcaagataaaagagaacttttcaggaatttgcccccagcaccatacctggtggatctggaagacggagacaagcgcggcgtgcaggtaatcattctgaggctgtttggtgtaaaacacctggatcggatgctgccgaccctctaggtagaggacgggggcgccattgaaatactgagagaacaggtccacatccatcgtagctgacatcacaatcacctgcataagagaacgaagaggaggaccagaaacaaatagtgggaaggcctttccgtgtccctctcgagccccaaaagcagatgattgaggcctgtgccacccccatcacagtttactttcttccaaggctctgagcagaacaggcagaggaaaacaccctgctagagcacacaggtctgtttcctttcctttccttctttttttttttttgagatggagtttcaccgggcacggtggctcacgtctgtaatcccagccccagcactttgggaggcc[134 bp omitted]gaggtaagcaatggcgtgaacctgggaggcggagcttgcagtgagctgagatcgcgtcaccacgctgcagcctgggtaacagagtgcaaaaaaaaaaaaaaatcaagacggaatttcagtcttgttcaagtgactctcctgcctc[364 bp omitted]tcctgggttcaggcgattctcatgcctcagccacccaagtagctgggattacagatgtgtgccaccacacccagctaatttttatatttttagtagagacggggtttcaccac[140 bp omitted]gtttccctcatactttcaggggaagtttccctcatactttcagaggaagtttcccgagttcctttctcctcttctgtgcagctttcaccactccaaagagcacatctgtgtggatagtccgttcgtgagcttcatccaaaatgacacagctgtatttccgaagcaaagagtctgaaattgcttcacgcagaagcatgccatctgtcagaaacttgatcctggtgtcttctgaggtgacatcatcaaagcgcactgtatagccaacctgtgcagggaaacaatttattcagtcaccaaacatttcttgagcgcccactgtgtccggcactaagttgggcacttgcactaccacagtgaacaagaccaacaccaacgcttcccactcccttgggaagcatgcagtctagctgctgagagagacaatggtcaagtttactttaaccgcaattaatgtaactattacaaggaatatttaaaattaaccttctacctcaagctatttaatagtttcatgtgggccgggtgtggtggctcacacctgtaatcccagcactttgggaggttggggcaggcagatcacgaggtcaggagtttgagaccagcctgaccaacatgctgaaatcccgtctctactaaaaaatacaaaaattagccactgggtgtggtggcacgtgtctgtaatcccagctactcgggaggctgaggcaggagaattgcttggttggaggcggaagttgcagtgagccaagattgcgccactgcacctcagcctgggcgaccgagcgagactatctccaaaaaaaaaaaagtttcatgtgaagctatgtacagatatgaaaagacgtctaaggtatttttaagtgaaatgagtacacacacacacaaataaatctgtcttatatacagttctgagactcattctcaatactcacatatacactggcataatgcttacaatttttctagaatgatatatagataagagagttaagagaggttactgaaggcttaagatgttcaaggaaagcaactaatttatccaacctgacgacagattttgaaagcaaagcacatgggaccaatagagcccctgatctctcaggagctggtaaagaactctcggaagaataggcaagaaagcagctcactatgtaaaaggagtcttgtttagaaaaataaaaggcagtgggcatggggagagagctgttgagtcaagaagtactaatagtcaagaaggaaccaggtaccagcttcccaagttcagttctcttctcatctgagactctagtagcaagagagatggcagctactcgacgaggctgggtcacagcaatgatgccctggcggctgatccctccttcatacaggtactgagggatctgagttgtcttcccagagccagtttcccctaggagagagggggaaaaaaaaaaaaggctcactgaaatgcaaactggggctcggcaccagggctggcacctataatctcagcactttgggaggccgaggtaggaggctctcttgagcccaggagttcaaaatcagcctgggcaacatagcaagaccccgtctcaacaacaacaacaattagcctggtgtggttgcatgtgcctgtagtcccagctactagggaggctgagacagaaggatcatgaggcccaggagttcaaggttacagtaagccatgattgtgccactgcatgccagcctgggagatagtgtgagacactgtctcaaaaaaaataataaaaataaaaaaagaaatgcaaatcggctgggcacagtggctcatgcctgtaatcctagcacgtggggaggccaagggaggaggatcacttgagcccaggagttgctcctgggcaacatagggagatgccgtctctacaaaaaatacaaacattagttggacgtggtggtgcacgcctgtggtcccagctactctgaaggctgaggtgggcatattgcttgagcctgagaggttgaggctgcagtgagccatgatcacaccactacactccagcatgggcaacggaatgacaccctgtcttagaaaaacaacaacaacaaaaagcaaattgacataaatttcaccaaacaaacagctcaaagtcagaagtaaaagataaaataccctgtgttggtaaagcctcaggagaatgggcattcaggtatgtatactgctggtgaaattagctggttaattggtattgtttctcaggtggtcaaattatgttttttaaatctttaaaatgtttatatcccttgacccacaattctacttgcagaaattgattctaacaaaataagtaaacatgtgtataaagatacagcttcaaagagattttattcaattttgctcctgacagaaaaaaattggaaacaatataaatgttcaaaaggtaatttacatagttaaaatataaaataaaatacaaccgttacatagatttctgcatactgactgacatgaagagacatccattcatgcactgctgccttcaactcctggccactccccagcctgctgcctcccttcaaaccctctgcctctgcccacactatgggcagaacacctgccctcacactgcctgcctcgcaaactctaagatgagttaggcctcaaacacgctcccctggctgcacagtggccctcctctgggctccgtagtgccttgttcatctctcttccagcactgaccatcctgtgttgtacagaagcgtttaaatgtgtccgtcctcctccaacaccagaagggaagctcccagagggcagtgctctgaatgtccctctcgtgtacttgagtattttgcatacaataagcacgcagtaaatgttacttcctaccctgtgtgaattcctttaacagtgcctgattagagcaaagaactcagtaaacctgcgcttccttcccctccctctagctaccaccaggcctctctgacttcaaaaagtcctccagtcccatgatttgtgggtttttttccctgtcagtctgtcagccccctctgactgctcatccttcctgacccagataagaatcagacaaaggatttgattattctgcaatcttcctgctgaatccactaggcaaaaccccaaactttgatccatgtctctatctttcatgctcctataccagggcaacagagcgttgctaaagtaaaatacaaaatgcttggaaccagaagtgttttgaactttggattctttcaagttttgtaatatttgcattatacttactggctgagcattttaaatgtgaaaatctgaagtcctaaatgctcccaaatccaaaactttttgagcatctgatatgacactcaaaggaaatgctccttggagcccattcttgacttcggattttcaaatttgggatgttccacctataatctggctgtgcagaagcaaacctgagtttatagtgtagccgaaatgcacctaggcaccactactgccatcgatcttttttcttgtttttgcagcctgtctcgtctccatcctccccaagggcccacttgaagcccagtgactcccattctgagcagggctcctgaacctgtctcacagaagtggggttctaaaatgtggtctctccctaactgcccctagaagcccttctgcagtgcaccatccttacatccgttctctagccctgcagcctcttagccttcctcctcttccagaccagccctgcatctagcccttgtggccaagttcccccgtcccccatgcctcctgatctttgctctgttagctcgattctatcttctgcctccctccctactgagttcttcccctcaacctctgaatacagatggtccctgtcttagaactgtttgacttcaggatggagcaaaagtcaaaatcgtacagtagaaactgtacttttgagtacccacacaactgtcactttcagtatggtattcaataaattgcatgaaatattcaagactttattataaaataggtttcatgttagataatatcacccaaccataggctaatgtacatgttccgagcacactgaaagtaggctgggcatattaaatgcatttccaacttaggatattttcaacttatgaggatgggtggattcatccacacataaccccatcctaaatcgagcagcatccataaagtttctctcagcttccctcctttttcctcaaaacagaagcctcttccccctgctttcagccctcagctcaatgacaaatcagctgttacccacacagctttgttgaaatagctctcgatgggatggatccacgatcaatagtgtcagagatagtctgtgaaagtcatgaaaaattttatgagaggaaatgtatgcaagaaatgttttacaatttaaaagtgattaggcctcctgaatgctttataaaatgtcaccataactcttagctgtagaacttgcctgctttgcagctaggtaaaacctaggacacatggagctaaatgctgaaataagccagaccttaactgcacttctgtctaagtcctaggctgtacacctagcacataattaaaatcccgaacttaccaaggttttcaacaaaggtaaaggttgctaaaagttaacagtgtaacatgtatttaaaactattgaagagacactttatgtgcaaggtgtgtaaggaaagtaaagtacactttcggtaaaaagattatcaggagggataagaatgcacatttttacctacgttaaaaggttaaataattgttttgagggggccaggtgcggtggctcacgcctctttctatatcaaccaatcgggcctagtaaaaagcgctgctaaaaaacgtaaagaaaaggctaaaaagctaagggagtaccaaaaccaccaaatggactcttggtttgaaaacaaaatcatagcatgggtcatcccattcctgggccctctcctaataatatgcctggaactaatgttcttaccctgcctaattaatctttttcaaagatttttaactgacaggatcatggcaatttcacaaacaactacccaaaaacatctacagacggcattgctcctagtcaacccgagaccaggaaactctccatcccctcgttgcaggaagtagccagaaagaacatgccgtccctcctcctttttataactatagggtctggattgacaaagcaggaacatcaccatcttggacaagcccctcattcaaaagttcaccttaataaaaaaccgcctaaatccaaaaggtatcagcctaatggctaaggtcagcacgaccataaaccacaaataacatctccagccagaaacattccaaactcctccccgaccagagacatgttaagggataaccccactctggccgggaatatgccagccgggaatatgccagccgggagataaaccccctcgggccggaaaaatgtctgccccaagataacatcccctgctcccaaagagtccaaccctgccaaaaacttctccacacatataaacattccaagcttgtgataagccccctcaccctaacaccaatatatactcttagtctgtaagagaaagggctcctgaccgaaatcggccaggagcgcctctcaggttttaactaaagaaaagctgtctttaactgccagccgcgtttcgtgtttctttcctttttctttaactcttacaaatagctcacatccaaatccagtgggcatcacatccaagtccagtataaccggacttgactgctgcatctgctcactctctattcctttgactagcagcactcatgggtctccttcctctctttggctgctcatcctttccgtccttcagtatctcctctaacacgttggggatcataagccccatgaaatcagtccctgccccacaactctgcctcttttcatgcaccagaaactacaccttccctttcgaccggaatgtgttcaggttcccatctctcaaacgggctttcccccctgcctagaatgccctccctcccacacgacctccccagccgcctcctcacaaaccgggtcagatccactcttctaagatccgcaagcccccggtacgtttctctacccttttacgcggaaggtgagtctttgcctacacacgttggtcactctcaccgggctgtccagcgcctccagggcagggctgccggactcttcttcgaggcccctctccaggtctggcccagaaaaggtattcaggtttgttgaagccacgaacgaaagggattgagaggcatgtaagaaaaactgctctagctaagccacggacgaagtgcaaggaagagcccgccggcgcggccactcaccgatgaggaccgcgttgtccaggtttcggagctgggccaacagttgcccccgcgcttggaagatgggcagactccggcgctgcagctccacagcttcagggtagggactggccgagggctgggccaggggcggctgctgcctccggcctcctcctcctcctctgccgccgctgcccgcagtcagcagcatcaccacttgcctcccgggagggaaggacccagcgcggctcggaggtccagagcctggccggaatctcttggccggcgggaagcccgcctcctccggcatgtcgggagggcaccgcggcgggaggcgcaagcgccgagagctcctgccccctctcaggtgcagacaacaggagcacaccgccccttcctcgccgccacgtgctggcggctcccggcgaccaccgatgacctcacggccgccccagtctttagaaaaagggactgcatctcccagcatgccttgggggcttgggaaggctttcacttcctgggggtgggaaaagcagggcctgaggtacaaccaggaaaaggcccggagctacaaccgggaaacacaggatgtaaggttccgtgggactgtagtcttggttaacgaggtttttctcattgttttattttttttttttgagatggagtttcgctcttgttgcccaggctggagtgcaatggcgcgatctcggctcacactgcaacctccgcctcctgggttcaagcgattctcctgcctcagcctcccaagtagctggggttacaggcgtgcgccaccggggcccgtctaattttgtatttttagtagagacagggtttctccatgttggtcaggctggtcttgaactcccgacctcaggtgatccgcctgcctcggcctcccaaagtgctgggattataggcgtgagccaccgcgccccgcccattgttttgttctagtagcattacttcttttcagtaaacccgcgttttccccttctctgtccaaataacagtcactcttcaaggaaagtacttaattctgtaaaatcaatgagaagcgcaaacgtgcattgtctaatcctctaaacaacttataagttatgtggtatatactggttattagattatctctaatttacagattaagaaattgagtcatcttagtcattcagatgtccccaaatcataattttgtgatcatcttgtgttacagaaaggaaaaccaattctgatatacatgaatttaactcagaaaatgactcctccaacggatgtggtcgcctccagtaatacaagcagagaaaggagggagttcaatgaaattaaaattgtcttttatctttcctttcccccaaccattccagccagactctcaagttctctacatggctgtgcaaccccatcacagacacttcagtgaagattcagaactgcagcagaaaaaagtaggattataactagttcttccttaccctcctaaaagttcttagatgatttgctaatttaccacggagaatgccaagtagctgtttgctcttacaggaaatgtgatttccagagaatacaccgtaagcttcagctcatgtgaagggtatcttctgaagctcgtttccatgaaactcgccctgttaaatatctcccttcccgtgattcgtgagagagctagtctaaaaacaaaaaacctcccctttgctccaggtcggagataattttcctctagttgctgacagtttggtgaccaggcattactgaaaatgtgcacgttgaaccagcagcagatttgtgtttaagaataaactgacaaattttcacttcctaccctgaaatatttagaaaggcaacccaaaactacaagggataataaatgttaactctcaaattatggactttgagtaaagacatcccagtcctttttcccagtgtgctttccagagtaacttaaggtaggagtccgatgttccaaatgattacaataatttaggtaatgtaaatgggtggacttatttcttgatggagcacattccacctctacatgcagcccctaatcatttctaggcaatggctgtcatgtagacctattattgccagatcttccaattttctcaagaaaagccaaaagtgaagatttttatctgtcaatgttaaatacaggtttaaacttaaaaaaaaaaaaagtactgtcaaaacaaagcacataggtaggtaacaaatctgtaggtaactcatccataatctctggcctaatgatccagctattctatagcctcaaagctaagaggaccaaagagtggaaaaattaagtcctatatatgcatcaagccatgctgctcacatttctcccattggtagactgaaatctgctgtttctcctgaagaagtctcttggggttcaccagctttcatatgtagatactgacaagctaataactattcagagaatatcctggttcttccttcaaacgacgaagtgtcagacacatttcatttttaacttgtctgggatggtctgtggacttaactggtctgatcacgaccataacagctggtggtcacctttgcttttccgaccaccaaattactgcccttgatcatgttcagtttccctctatcccactttcagagacaaccacaagcttcagcaactaggctcaagcttgcatgcatacactttaatccctctataattaaaaataccagataatactttgctgatcaataaacaaaggtatttattcagcacccatgtgccaagcactgtgctaggcactgtggtggatacaaaaattaagacatggtccctgcccttaaggagcttacattctcatgagggagacaagactaatatacatgtaccagctaggaacagtacaagacaatatataatttggcgttaagaatgtcatacagacttgaagctttatagggattcagagacagacaataaaataggccttagagtcaagattttttgaggaatcaggaacaaggccaggccttgaagaactgaagagacttaagttgaggtccctgttaggtagaagtgggagtaaagttaagaaaaaaacaagtatgcatataatgtaggggcttactaagaagtcactgtggatttctgagcagaggagtgacttgatcatacaagattcaacaattttattgcaaactcataaaatatgtttaagtagcctggagacatcctacagaacacagaaaataatggcaggatcatgactaacaacatagctggaactcacctgtcaaagaaaaacagctacaacataaaacactggcaggatagatgacaatagttctaggaagcccattactcaacatggcaatagctccaatgcttccttattttcagaggccccagagactgagggtttcattatccagacccaggacttaggtgttctgcttctagagactacacaagaggtatgaaagatatgaggacatacaagagtgacacagaaaaaacaagaggaagagagaaacaaatagaaatccatactggaaaaaaacgcaccgaaatgtatataaaatgtatctcctaaggagatgcaatttgtatgtccatttatttttaaatgaacgtataccgtatttccataacaaacaaaaaacactatgctttagtcaagtgtgcttttcagtatcactagaagaatccaggaatccctcaaattatgtgtaaggttagttggttggtctcaaaattccatgtatcaaatctcactttcagtttatttgcattgtgaaagggaagtgtgttctggaagaactaagattgagaggtaaattggggagaaagtaaggacttttccttatgtccattcaagcacaggtatcctgtcaagcaacacagggctaggaatggtggttgtagggctggccaaactgatgagaggtgattgaaattaccactgctcaggacacagtgtagtcagtcacacagcagggcatcctgccactgggaacttgcaccctataaaatcggagaaatcaaaaaccctgtaactgcctgcctttaggctgtatattcaaaatgtatttcctgttttacctagtcattaatgtatacagatattccctacttaaatgaacagtgagttaacagattttaggattagtattttaccacaaaaatgccattcattgcataactccaactcagggagaacaaataaaactagagaaactcatttctagcccaaaaacaatttaaaaaaaaaaaacaaaaaacaaaattctaacaaacgtcactgataaagcgttcttgagcaaaaacaagataggataaaacttaagaatcccataaggattatacatgctaagattggcttttaaactttgaaaaccttttttaaactgcttaaaaagcagtcccatagacccaggttccataaaattgcaacaatcatattcaaagttattagcaacatgtaaaatacttaaataccattagttatgcaattccatttaaagacattaaaacacttttcacttcaaaaacaatctgaaaattcctatttaggatgtccattatgtttaagcctatgtctatctttctgaggacaatgtcacattctggaaagctaccccttaacaaaggttgaatgaactactactaacaatccacttttgggaaagggacctgtgcctacatgccgttaatgaaagctgtttggaatcatctctttcctaggggtgctctttcgactcttccaggttctggaagttacttaagcagtgtgaatgcaaacctgctgagactcagggaagacttaatatttaggggaagtatttattgaaccacagcattaagtgtctacttctgtggaccctgtctaatttctacctgattgggaaggtaatccaggtacttggctctgaaaaggttcttgaattttcacgaagcaaatgactaatgttaactagccaaagaccctggaagaacatatgcctagctaactggtatctgttcgtctggctccaaagtcaacattctaacttggtttccaaatctaatgaaaatctgagaccctgtctctattttttttttttaattaaaaaaacaaaaaacaaaacaaaacaaaaaaggcaaaaaaaaaaaaaatggctgggcatggtggctcatgcctgtcatcctagcactttgggaggctgaggtgggaggattgcttgagtccaggagttcaagaccagcctgggcaacacagtgagaccccatctgtatttaaaaaaaaatttttaattaaaacttttttaaaaataaaagaaaaaaaaagtctaatgaaaatcttcctagttttacaaaaatgtggcccttaccaatctttccctggatacttcttaatggagaaatgtaagtaaagcaaataagatgccacattagcttacagctgactttcctatagctgaattcctactgctacaagaaccatcctccctccttttttttcatgttgtctgacaaagtttggcaaaacccagatgcaaaacaacctatccagatgacagaaataaatcatcttcctgctgaatcttgcattctgagttagtaagatgtacacaaccacagcatgacagccacgtatttccaatcctgaaatgaaatccagttaaaagttgtgaagacacaggaagaacagctgtgtaaactgttctgagctcagatctacgcaggagggctacaatacattatcagaatttaaaagatcacacacaaaagctttaatacagtgagagaaaaatggaattccgttttattttgtcctctctgaaacttccatttacaccatggcctcatctatcaagaagaggaagaaaaggctctgccttataccataaaaatcaagtactcatgtacttgttagaggtggcaggatatttgtttctccagttttttggctctaagaaattacactttcagtaccagtgtagtgaggaaccactggcaaactgttggaaatgtcttctggattagtcagtgtaccatttcataaagtgcttctggagttaaaatctgccaagctgtcaaaagtgtccacacttttgcaacaaaggataaaagatcccagtgggtatcaccgagtccttcccagctgggtctcattattggcactgctgctttaacctccaagccgctggccctcaccccaggcgaagcctcctggccgttcctcaggtagtggattgtaatttggatcctcatctggtgtatcaaaaatagctttcctaaaagacaagcaacagatataatttggtcccagagtcatctcaggtccaaagtactacaaggtcagttcaggccccatagggtttccaccaataggtaagcattacacctgcctgccaattaaacagttaacatattgtaagagcatctataattattaacatttacattagcttttatcttttactgatttttactacaaaagcaatccaaatcataataattacagagaaggaggaaatagagatgagcaaaatatcctcaatttccagaggtaactattgtcaatgttttagttattctttgggaatttttacattatgtcattttacaaaagttagatcacactacatgttttgtaacctgactttcacatatttatcattaatgtttccccataaccaaggtatcacccaagtgtgcatcaacaggtgaataaacaaaatacggtacacacatataatagaattttttttttttttttttgagacgggagtctcactctgtcgcccaggctggagtgccatggtgcgatctcggctcactgcaacctccgcctcccggattcaagcaattctcctgcctcagcctcccgagtagctgggattacaggcgcccgccaccacgcccggctgatttttgtatttttaggagggaaggttttcatcatgttggccagactggtctcgaactcctgaactcaggtgatctgcctgcctcggcttcccaaaatgctgggattacaggcatgagccactgcacctagtcaacatggtgaaaccctgtctccaccaaaaatacaaaaattagcctggcgtggtggcgcatgcctgtaatcccagctactactcaggcggctgaggcagaagaatcacttgaacctgggaggcacaggttacagtgagctgagactgctccattgcactccagcctgggcgacagagcaagactgtctcaaaaaaaaggaaggaaattcaggcacatggtacaacatggatgaaccttgaggactttacgctaaatgaaataagaaataagccagacaaaaaaggacaaatattgtatgattccacttaggtacagagtagtcaaattcagagaaagaaaatagaatggtgatggctggggtggggagttgtttaatgagtacagagttgtagttctgtaggatgaagagagttctatggatggtggtgatggcagcaaaacagtatgaatatacttaatgccactgaacatttaaaatgagttaagatggtgaattttatgttaggtattattttaccacaaaatttttaaaaaattaacaaggtatcccaagaaaaattactgcagaacataggaggggatagtaaatgtccaaaagactccctaagtactatgatgtagtaattcaaaacctcactaaagaaggaaccattaaagcagcatcctcaatttgcacttatatttctacttgtaatcctccacagttgataaaattagaaatgtatctgaaaacttctgatttatactggagtcagaaaatagtataattcaaaatgagtttttaaaattcttacaaattaacaataaaaacaaacataccaacagaaaaaatgggcaaagggctgaatatgcaattcaaaaaggaaatccatgtggtcaataaacgtgagaatgtttgctctcacaataat[132 bp omitted]caaaaccctatctctactaaaaatacaaaattagccgggtgtggtggcgcatgcctatgatcccagctactagggaggctgacgcaggagaatcgcttgaacccaggaggcggaggttgcagtgagccgagattgagccactgcactcaagcctgggtgacagagcaagaatccgtttcaaaaaacagcaacgacaacaaaaacaaaactgagatcccttctactgcccaaacattagcaggatgggggtgggggcacagcctggtatagggagtcaagagccccatcagaccatgcacacatggaggtggcctgacgagatgttagcccgagtaggatggggaggcatccctgtaagagggcagcctggtctggggaatctgagggtgagtgagataagcaaggcatccatatgggagaggtggagactatcccgaaagactggttacatatgaggggtaattaggtaggtaaaacattaatcataataagaatcaggttaggacagatggaaagggcagatggaaaggagtggtacattcatacaaccaaataatattcagcaataaaaaggaacaaattaccaataaatacaagaacacagatgagtctcaaaaacattatgttgaatgaaagaagccttataccaaagagtacatgcatactgtacaattctactcatgaagttgtagaacatgaaaaactaatctacagaggaacaaaaccagaatagcaattgcttcttgggggacaggtacaatgattgacagggaaggacatcagggaactttctggttgatggtaattttctgtcttgatagatacacagatgtgtgcatttataaaaactcagttgacacactcaagatttgtgtattttgttgcacataaatactaaactctagttactgatatgcacactcaagtatacaaggaattaagtatacatataatggcacatacattttggattggaaagctagatgtagggataggtgtgcaataagaatagggaactattaattacagaatctatgtggtggctacatgaagctcactccaatttttttctgatttcctataagtttgttaattttcataataaaatattggaggaaaccaataggaaaaaagctagaatgaaccatgaggtagtactagaaatgggagtatagtataaacccatgttttaaaaaatacatagatctaaaaatatacacatgtatacattatcatacatacatacatataattccattgctctgttcactgagaggatctgggaatagcaacactccaatagcaatgagcacatctagcacccagatcttggcttctaaataccattctccactttaaaggaaccagggctccttgaagaaacagctgattctaggactggatcaaggagagcacaggatgagcctggtatatcttgttgtgccagaaaacaattgcaaaaaaataaaaaaataaaaagtggggtgtagtggctcacacctgtaatctcagtgctttgggaggccaagagacaagaggatcacctgaggactggagttcgagactagcctgggcaacatagagagaccttgtctccacaaaaaaaaacatttaagaaagaaaataagcagagcttggtggtgtgcacctgtagtcccagctactcaggaggctgaggtgggaggatcacttgagcccaggggcttgagttaacagtgtgctatgatcataccactgcactccagcctgggcaatggagtgagacctgtactgcatatgtaatttcttgtaggactgaaattgtttcaaaacattttttaaaaatcataaacaatgagacatcatcctacaactattcaactaggaaagggtaaataaaatgccttccttgtttgattaggatgtggggaaatgaacagttataaatgctagttgaaatgtaaacctgaacatccattctggaaggcgtttggcaacaaaataggaattctacttctaggaattatcttttgaaaataatcatggatgtgtgcagagatttagctacaaggacattcaccactccaattacagaagagaaaaccaagcactaacgtcaatgtccatcaacaagggattagtataattacaccatatccataccatggaatatcacctgttataattttataacacttcagggtggaaaaaacaattatggcatactaagtttacaaggttacaaaaattgttttttgagacagggtgccactctgtcccccagcccgaagtgcagtggtgcgatctcggctcactgcagtctcaaccctctgggctcaagcaatccttccacctcaacctctcgagtagctgggattacaagtacatgccaccatatgcagctgattttgggattttttgtagagatggggttttgccatgttgcccaggctggtgtcaaactcctgagttcaagtgatccgtctgccttcacctctcaaagtgctgggattacaggaatgtgttatgttgtccaggctggaatgcagtggctatgttaaaggcctagcccaagaagagcagtggctgttcacaggcgcaatcatagtgtatgcagccttgcctggctcagcgttttttaaaaagtacacaaagactgaagaatacacattgaaaagttaacaatggtggccactgctatacccaagtgtcgggatagtggacaatttcactttcttcttttttgcttactattctacaacaaacattttataacaaaaactcacattttacttctcaattgagccctttttaatatggcatctcccaaggataccaaattccagagtagaaagaggtctcataaatcaaagttctactgcactccagcctaggtaacagagtgagactccatgtaaaaaaaaaaaaaaaaaaaaaaaaaaaaaagaaagaaagaaatcaaagttctatctcaggaaactgaagtgcaaaaaagaaaggacttgctctatggctggtcagtgggacagctacacctggtttccagtccaaagctatttccactctgcttcactgcttatctcaaccacctgcttggcaggccacaaagtccaccatcagaaactttcatcagttttgcccattttgctaccttacttcactaaacgtggacagcagctttcataaaaccagcaggctcctaccagaatagaagttctagtggtcatctctaacaattaccaggttactcccaagatatcttgagcctgttgacgttggtcttgccacaaccctggcactgtctgctcctacccagtccaagtgctcttcaactgtagccagaatgctcaatctgcaaatggttactgacctgagctatgtgtactaggagctaggggagccaaagaaaacacagatcatgcccctgtcctggtttgcctgtaagagtatgtaacctggtgttaaatactcacaaaatagatggtgttttcagaattcttattccaccaggttgattgggaaatacatcttccaagaaaaaatatatgtgtccaactgcaatacctagagtcaagcagaaataaaggatgagggagagaattaaaatttagattgcaggtagacctaccaacacaaattgcctatatttaggatgaatgtcaacataattattaaaaattaatgaactaatattgtggtattttacaataggtaatacgtgaaggccaaacagaataaacatgaaaaatagtaacaaaatacttttacaggtaaaataatttaaaaaatagtgagaagagccttacccaaaaggtccacaatgattgagttccccaacaacaaggaaaatcccatgagcacccagggcagaaagggggcctggaagttgagaaggccgaagaagttcatgcggacataggggttccttcggctccacacatagacgagcattattgtaaaggcctggcccaagaaaactaagctcacaaacagaccaaaaagctagcagatggcattaaggaaaatatcaacattaaaagtttaataggaaagactgagcaggagaactaaagattgtgttctaacagaagtttgaattggaaaagtcaagttgttacatctttagaatagaaggagaaacacccagaaaataattacccagagcaatcaggcaaaaatctgcttaggctaaattatcgagatttacagctacttcaaacaaatactctgctttcgtgaagttcttgcctctttggaaaatgtgttaattcttcagtcaataattatattaaagcttgctcacgattagcacctttacagagatgaataaagctagctggaacaaaaccatcttgtcagaccgtaccatatctaagtctattgtatagatgaaaattctttttctgaaaaaataatttattggttttggtagccaccaagtaaatgtcttaccaacttagtttaaaagtgaagtacgccaagcagtaatgatataactgagttgcttaacagtaacccacctgggttaaaagttcctttgacttgctcatcctgtccgactgctaggtttggaaacttgtcacagaaaatgtgctgtaaaataaatgatagtgccctgaagctaagatctagagaactgtgggagacagatgacaagctttaggaagagccagggtgttcttcaacattttcccgtgttgtttgttgaaggatacggtcattaagaatccaccaaaaaggaacataaatacaaagtctgctgtccgacctcggaaagagccttcttctagcattcgacagtaacgatatcttaagttccaagttaagaaaatattaagcacacgaatatgaacaaagtaaaaatttaatgttatcttgtaagtacacttggattccatattatttgtaattagtcaagtcttcatttgtataagaatgtttgagtggtaatgtgattacttttttaccaagcatttgagaaaaggtcaagaccagcatcattttttacaaactgtccctggctgggaactaatccagatgacacacagacatgctttcagtcccctattcttttttttttttcttttgagacagagtctcgctctgtcacctaggatggagtgcaatggtgccatatcggctcactgcaagctccgcctctcagattcaagcgattctcctgcctcattctcctgagtagctgggattacagttgtgtgccaccatgccaggctattttttgtatttttagtagagagcaggtttcaccatgttggccaggctggtctcaaactcctgacctcgtgatccactgccttggcctccccaagtgctgggattacaggtgtgagccaccacacccggccctccagtcccctattaaacctttaaaaatttgtattgtctttcctgtgctcagccacaccttaatatgcaccatctttgctttcccacatcctaacttggaagaaatccgcagcaagaagccttgtgtgctcaactacttttccagcctggcaggttgagcacctcagtcaataaagatgaattacgatgagaaaaaactttaatggaaacttatcagaatgatatcctacataggatataaaatggattcctgccatcctcaggaaggaatgcagctgcagatgagttgaactgtaactccctcttaatacagagggcaggggtggaagaggaatgccctgctctgtggccccaattaccattggatcagagctggggttttcctttcaacaaaccggaacttgacaagcccagcagacacaaccactgtctttcagccagtagttccagcaaccaggacccaaggagatctcaggttcccactcctcatgaacccattccaaaacttatgcccaaattctgctgaattaccattgcattcaggttgttttacggcttcgaacctgttggttactgtggaggtatgcctcagttaaatcaattctcccctcccttgatcagatttgtaagtaacaaaagagcagaagtgctatctttttatggttaaaacctcccatttgaacaaagtgacctacagacattttcaaaacattactacctaagcaactactttatgtaccactgacccagaaatcatagctaagatggtaccaaaaacaagtaacaggatgaaaagtttcaacttaattttttacttcctaagaaaaagttttgatgctgaccccatttaataaaggatacagaaaaatcatgttaaataaaaaattgaatccaactggcccaaaaaataagaagttggtgattaatctccatatctgttaaaaaaaaatcaagagaaagatgtattaagtaaaataaattaccaggaaacagttccatattaatacaaaagaaacatcctatgactgcggtggttgagaagccttggacagagtgatactctgttctgaaacaaaaacgggggcatataatctgatgttagattttttttgctgcttttagttcaaagtctgaaagacatcattgggactgtgacatttataataataggaaagaaaattttaaattgtgatcgtcgtatggagaaagtttgctggaaagactaggttaatcggcagaacagaaaacagtgctttcatatgtagtatcatcatataataaatagaactgacatatcagagaaaaacttcagggtctaatataaattgctgagaaatgtttacattaggcagtcagaaacatctaaaagaaaggaaaattctttttttttaaactaaaacttaaaaaaaaaaaaaaagagataggttctcacta[136 bp omitted]ccctacccaacatctccacacccacagtaaccactctcaattgtagagtgcttaacgttttaaaatgtctactatctcttgtgatccacagacaagcaagctacccccaattcacagataggagactaaaagttgactgactagctgaatactagttattcagctaaaagttgaacttttaaatgtcctgaccaaggacccgcaggagtagatggaaactctgatggcaaatctagaactcctaactccaaatgcacagtgtcatcaagagtttaaccccaggcagagtaaagccaagtaggaagcaagacttacttggatggaactacagcgccatgtgagtattgtgcgaacacagtgacaagagatgacaggactgctttacagaccactaaattcttgagaattgttaactattaaagttgaaacaattcagttctacatattaattatccagattttagagtcctcatcctagtgaggagacaagcatacgcataactgcaaagtaaaagtgagagatgttctaaaacaaaggaggatgagtacataaaggttacacaaaagctgcgttttgaaaggcaagctagagttcaatggatataaagtgaatgaaacacatttgagacagacagaacagcatgtgtagaggcacagttattggcttttgggtctctcccctactccaactatggtaagatcatcctggaacagaaaaatccatctctcttttagcattttattttgagacagggtttcgctcttgtctcccaggctggagtgcaatggcacaatctcggctcactgcaacctccgcctcccgggttcaagtgattctcctgcctcagcctcgccagtagctaggattacaggcatgtgccatcacgcctggctaatttttgtatttttagtaagagacagggctttaccatg[136 bp omitted]ttgtaatctaataaaccaccatatagctttagatgtttggaatttggttagtatgatctgatccctggaagacagatcacaatttaaaagcactaacagaattgagtttctggaccatggtgataacaccaaggtggtgggtgtgcctaggtgctgaatggacaaaataaggccatccctgtgagacaacccctaagcagctagctagtcagcctcctctcataggacaacgttaagtctaaaccagtgatttccaaatacaggaactggacacatcaaaacgatgcagggaactttaaaaataaaacacagattttaattcctacccttgcaaattctgatttggtacttgttgaggagcttgagaatctcttcaaagttccctaagggattctcaagtccaaccaggctgcagaatcactgctttatatcctgacaaggcaacttataatcaaaggtccccactgggttcttttttaggatagtgtataacaggatttgctactaaacagtaagaaaaagaagaaactgaagcattaatcactattgtgatgaaccacttacttgaaagtgtttaaagattaattcaggattgaagtacaactgaaaaggtgtgatcaattccaactgctgaaatagaaaaagagcttcttaaagcaaatcaagaaacaaaatttcatcatttacaacaaagaattagtaggtctagcaatttccaactctcggtcacttagacgtgatttcctttaagcctttcttcttaggccagaggaagaggttggtaaagaattctctaggattggtagaattctttgtatcctcaatacctaacacaaaaaagtctgttttatgttgcaatagttgaggctgacatgaagaaatgaggcagacaggtggtgatattttagacacaggacaaataaaaacagctgctatgaatctacccaccacatgggcaccacctgaaacagctgtatgaaacaacaaaactcacttgaaataacggagactggagaccctgccaccgttagggctgggtacctccagctagccccttatttagatccagagaccctttttattataagccattcccctctcgacagtttccagcttgctttccccattcctgtttcttcactaaacggaccttcctctcactagtcaccatggtaccacctggccattggcagagctctcggacacatttcttgggtgggaggctcccgcaaccctaacccgctataggtccggcgctcatctcttagaaactgacctgaccccccatgaagcagcactcccttctcgcgtcactggataagcattcttggcgccaactcgaaccccagagtaatccctgtacgcctccacccatccccgggaccagcccctctgggcctccccgaggcccaaaccccagtttcctgaagacccagtcatatccagcccagataatgagaaggtggcactgcagctgctcaccacggcggcggtggtgaggacgcaggcagtggtgtaggcgcggctgaccggtgggatctgcaggtactccagccgcaagctctggtacgccatcttccccaccgtcgcctgccccaccccccacccaccccatttccccttccgccagcaggccccggcggcggggcgggcccaaaggccccccgcccactttagttttcccgcgactgcccaatcaacgccaagcaaccgcaatccgtagagacctaaggaacgcacatccgccaatcacgagttgcgtcgccaccgcccccccccagcgccccatctccccaccctctcttctccaccagccaacgtccgggaaaaacgagtaagtacaggttccttctgccaatccccgccggccacagctaactttcccgcccggcccctttctgtcataattgaggtgtccacaaccagccaatcaggaacgcgagagtatcccgcgtttgctttcgctcgccgaggcgcgtatcagtcggaattttggggagccaaccgcgccgtctgtccctggcaagccagcggcggtttaaaggaggtggcgggaagcctgtgtgtgcttcaaatcgtcaccctcatggtcgctccggtaagtgctgcggggcagcattttctctgaggaggagcggggacgggcgagactggcataagcgtcttcgcgagggagcaaggcggcctgtgggtcggcctcaccccggcctccgacctgaagatcccagcatgcagcgcgggcgcggggcccgacggaagccgggagccggccggaagcagttcctgcgctctggcttctgggtcctgtcctgcgcgatcgcggggtcttagacagctcaactcgccgagatgacctgggcacctctgcgttgaatcggcaaatactgatcaagccgcatttattctgctctcaggaactctaagtctagcagagaagatgaggcggtagaagttcatcagtcagtgcccgaagagaggtcctaatgggaattcgaagaaaggagttaatcaaggaagtgtatttttttgttgttgtttgagatggcgcccacctgtaatcccagctacttgggaggctgagctaagaggatcacttgaacttaggaggcagaggttgtagcgagccgagatcataccactgtactccagcctgggcgaaagagtgacactttgtctcaaacaacaacaacaacaagaaaattagccaggcatggtggcctgcacctgttgtcccggctacttgggagactgaggtgggaggattgcttgggcgcgggaggttgaggctgcagtgatctgtgatcgtgccactgcattccagcctgggcgacagagcgacaacatgtctcaaaagaaaaaaagaaaaacagaaagaaatcctaccttacatatacagccaaacagttataaccactccatatttaaccattacaaacgtaaatttttattttattttattttttgagacagagtctcgctctgttgcccaggctggggtgcagtggcacaatctcggctcaccgcaaccttcgcctctcgggttccagtgattctcctgcctcagcctcccgagtagctgggattgcaagtatccaccatcacgcctgggtaatttttgtatttctaggagagatagggtttcgccatgttggccaggctggtctcgaactcctgacctcaggtgattcgtccatccggcctcctaaagtgctgagattacaggcatgagctatcgtgctcagcctacaaacataaattcttaagattggctgcatcttatcttcccataagatttgactgtactgcttattgcaaattatttcataaagtgcgtcctaaattcacctgataattgaagtagcagtttgttttagctaattgcctttatctgaaggaataataaaatttctcttatttctatgacaagcaatatcatttcatctcagaaaaagatgcctaggttgaattcccacaatgacaaggagataggggttttattttcctagatgtttatatttgagaggaattactcgcagacccttgaaaaaacatgtcagggttataaagctgacaagggacttactcatcttctaattgggtttttttcagatggcttggctggaggacaagcaaattgaggacattggcaacggagtgatcaaaatgatagatcatgaggcctaaaatgaataaggaaagaagagaagtggcagaggctgagaacagaaagagagggtggaggggctgtaaatcttgaagattagggtataatatgagtatatgggtaagaattggaagaattgtgtaggaggcagtagtcaaaaagtagaagcagtttggaagagtagttacaaatatcaagagccaggtggctaaaaggtggagctataggtcattgaagctcaagaaactgagtctctagggcattggttaagtcatctgtctagacttcaaagttgtctaggatgataattcagaagactgatctgtgccaaagtcacaggtaagggaagtgaacaacgaggaggggaaaagggagggtataggctgatggaaggagcctcagagaggcaaagagtttatatcctgttgtgggagtggcatcaggtataaaggaacacaaactccttattttttattgatttgcttctttgtttgctatctgtaatgtgattggttacttcctgcagaagattttttttttccaaatgaattatttcctttttacatttgcaggtttttcacgactgaaaacaacatagcaaaataagccaagatgtctgtggatccaatgacctacgaggcccagttctttggcttcacgccacaaacgtgcatgcttcggatctacattgcatttcaagactacctatttgaagtgatgcaggccgttgaacaggttattctgaagaagctggatggcatcccagactgtgacattagcccagtgcagattcgcaaatgcacagagaagtttctttgcttcatgaaaggacattttgataacctttttagcaaaatggagcaactgtttttgcagctgattttacgtattccctcaaacatcttgcttcctgaagataaatgtaaggagacaccttatagtgaggaagattttcagcatctccagaaagaaattgaacagttacaggagaagtacaagactgaattatgtactaagcaggcccttcttgcagaattagaagagcaaaaaattgttcaggccaaactcaaacagacgttgactttctttgatgagcttcataatgttggcagagatcatgggactagtgattttagggagagtttagtatccctggttcagaactccagaaaactacagaacattagagacaatgtggaaaaggaatcgaaacgactgaaaatatcttaattgctcagtagtcaaaaggaggagcctgtcaaaaagtagaatcataaggactgttcaaaccataaggactgttcaaatcataccagtgactgttcaaaccaaccatactttttattagatttgctttgtcaactctttcttgtattctgtgttttcctcttttttggtccactttgctgaggtatgaagtgtactactttgaactaggctgaagcatctgagtcttctaataagtgggaagggatccaacaaagaagccatgaccagttaaagatatttgcagagttacaccttggtcataagtcctttgtgaccttgattattttggcttactctttggatgagaccagacaagaaaaggattaaacgggtggctcctttaatattattattattgtttttgagacaaggtccctttctgtcacccaggttagagtagatttcagtggcacaatcttggctcactgcaacctctgtgtcctgggctcaagtgatcctcctgcctcagcctcccaagtagctaggaccacaggtgcgtgtcaccatgcttggctaatttttttgcagaaacgaggcctcactatattgtccaggctgagtggctcttttattaaccagtcattacactgcggaacagccaacatagagtacttgctctcgtcctgtgaattttctttcatgagggagtcaatatgtagtggaaagaagcatgtagcaaaaaagacaaccttgatctttaataaaaaagaagttggtttatttccaaaataaatcccctgacaaaaaacctggtgatgttaagcaattgactgtcttagagtccagcagaagaccttagacaaaaaaagcagaacccactggagtagaaaaggaagcatgtagcatatactcagtagtgaaatttaattttactgactgttaggtatctatgccaatttgttttcatacttcagttggttttggaatctgccttatacctaatatttatttattcacactcataagcatcaaatatttaatgccctcagtgggaaatttgtgtttaaactcaatggaatctaatatttctttatgtcgttagtccctgtaaaatgttaggtcacccaaggaaaggggagaaatagcaatggttgttcctaaggtattgcttgccctccatgtcttcctaaagagcagaacttggagtttctcctttatgtagagaagaagtaacttagggtgtatttgcaatgaaatattcatagatattgaaagcttgtgtttacatgaaatatgtttattatcaagaagtcctttttccaattctgtacattaaatatatgtgttttaaagggtttggttttttattttctgctgtctataatgccatggtatatttctttccagtatgactttttactcaattgaaaacactatctttttcacatttatagcttattcagaatctgctgtagtgggtcgaacagtgatccctccgaagataggtccatgtcctaattcctggaacctgtgaatgttgccttattcagcaaaggggtctttacaggtataattaaggatatggagataaggagatcatcctgcattatttggatggaccctaaatccagtgaaaagtctccttagaaaggcagagggagatttcagacagaaaaggaggaggtattaggacctaaaagcaggttggggccgggcatggtggctcacacctgtaatcccagcactttgggaggcctaggtgggcagatcacttgaggtcaggtgttcaagaccagcctagccagcatggtgaaaacctgtctctactaaaaatataaaaaattagccaggtgtggtggcacatgcctgtaatcctagctactcgggaggctgaggcaggagaatcgcttgaacccgggaggcggaggttgcagtgagcagagatcgtgctactgcactccagcccggtgacagagcaagactccatctcagaaaaaaaaaaaaaaaaaaaaagtttggagtaatgcagcccccacaagctggaagaggcaaagaagagattctgccttagagccaacaggtggattgcatttctggcttccagaactgtgagagaatatgttttaagtcatcagtttgttacagcagtcacaggaaacaatatacctattagtaggcatgttagtgaaatcagaatattgagatgttcatgaggatataagctatctattaaggaaactactgctgaggccttgacattattatatgcagtaatatggttcatcttaatacagttaagtatggtcatgacctggatagaagggtgaaatccagtgtttgaactcgggtccattttgtgttgagtacatgcttaataattgctggacattactgttgctgtttgttatggtggtgtctctgcagaaataatatagttgaccctatcatcctctaaaaagtaaattctcccttcagaaatttatgactaaatcagaattatatacagttgtttacccattctctgcttccctggaatgcaaggttgttttaacgtgtgaaaatgcatcaatagaacagaataaatagaaccactatagaataaaggataaaattgtcccatctcccatccagcatcaatctcacccaatttctcactttcccccccaccccaatatgagatcccattgttctgtaataccaaaccttccctggttttatttattctctactgtcatgcctattcaccattacataatggatgtaaatgcaaaaaaaaaaaaattcttaacatagctgggtgcagtggctcatgcctgtaatgccagcactttgggaggctgaggcaggcaggtcgcctgagctcaggggttcaagactagcctgggcaacatgatgaaaccctatctctactaaaatacaaacattaaccaggtgtggtggcacgctcctgtaatcccagctacttgggaggctgaggaacaagaattgcttgaacccgggaggtggaggttacagtgagccgagattgcaccactccactccatcgtgggtgataagagtgagactgtctcaaaaagcaaaaaacaaacaaaaattagccaggtgtgctggcgtgcacctgcaatcccagctactcaggaggctaaggcacgagaatcacttgaacccgggaggcagaggtttcaatatgagacgaggtcctgctgccgcactctaacctggacaacaga[135 bp omitted]caacatagtgagaccccatctctacaaacactagaaaaaatcagccaggcatggtggtgcatgcctgtagtcccagagacctgggaggctgaggtgggaggctagctcaagccagggaagttgaggctgcagtgagccatggttatgaacactgcactccagcctgggtgacggagtgagaccctgtctcaaaaaaaaaaaaaaaaatactcaacaaaatataagtaaatcaaatccagtagtatataaaaaggattatacacgatgaccaagtgggatttatcccaggaatgtaaggttggtttaactgctgaaaatgaattaatgaaatacaccacctcaatagaataaagaacaaaaaccctatgatcacctcaatggacacataaaaacatttgacaaaattcaacacccctccatgccaaaaacactcaacaaactaggaacagaagggaatttcctcaacctgataaaggacatctatgaaaaactcacagctaacatcacacttaatggtgaaatactgaatatcaggaaagaaagcaaaggaggcccactttcagcatcctattcagcatttgctgaagatcttacccaggaaagtttcccaagaaagagaaataaaaggaatccagattggaaagacagatcgtatctgcagatgatataatcttgtagaagaccattctgttgtcatcttaaactattagaactaatagttatgattattagaacaaataaatgagtttcagcaaggattcagaatataatatcaatgtaagaaaagctattatttttctttttttgagataaggtcccgccctgttgccctggctggagttcagtggcaagatctcagctcactgcagcctcaaccacccgggctcaagtgatcctcccacttcagcctccagagtagctgagaccacaaagagcttgccaccatgcccgactaattttttaaattattagtagagatgaggtcttgctatgttgcccaggctggtctcaaactcccaggctcaagtgatcctcctgcctcagtctcccaaagtgctgggattacaggcacgagccactgtaccaagcctcaattatttttctatgcactagcaatgagcaaacaggaaatcaaattgagaaatcaattccattttgaagacaccaaaaataaaatcctttgaagaaatttaacagaaaatgtagaaaactcattgtattagtctgttttcatgatgctaataaagacacaatccttatcaaaattctaattgacttctttgtagaaattggcaagctgatcctgaaatgtatatagaaattcaaaacacctagactagcaaaagcaatttcgacaaagaataacaaagttggagaactcatactttccaatttcaaaatttactgcaaagctatagttatcaggactgtgtgttaatggaataaagatagacatatagataaatagaggtaagaatccaggccaggcgagatagctcatgcctgtaatcctggcactttgagagttcaaggcaggtggatcacttgaggtcaggagttcaagaccagcctggccaacatagcgaaaccctgtctctaataaaaaaaaaaaatacaaaaattagctagacatggtggcgcaaacctttaatcccagctacttgggaagctgaggcaggagaatcacttgaagctgggaggtggaggttgcagtgggccgagatcatgccactgcactccagcctgggggacagagtgagactccatctcaaaaaaaaaaaaaaaaaaaaaaaaaaaaagagaatccagaaattaaccctcacacacacacaaatatttttaaaaaacaacaaaaaccagaaattaaccctcacatttacagtcaaatgatttggataagggtgctgggataattcaatgggggaagaagagtcttctcaacagacagtgttgggataactggacgccctcatacaaaagaatgaagttggatcctactgcacaccatgtacaaatatgaacttaaaatggatcaaagacctacatttaagagctaaaactataaaactcttagaagaaaacatgtattaggtttaaatcttcataatctttgtgggtcagtagtttcttagctatgccaccaaaaacataagcaacaaaggaaaaatagatgaactggatatcatcaaaatttaaaacttttgtgtttcaaagacaccatcacaaatgtgaaaagacaactcacagaatgggataataaattgtaaatcatt[137 bp omitted]aacacggtgaaactccgtttctactaaaatacaagaaattagtcaggcatggcagcgtgcacctgtcatcccagctactggggaggctgaagcaggagaattgcttgaacccaggaggcggaggttgcagtttatggtgccactgcactccagcctgggcaatagagcgagactctgtctcaaaaaacaaacaaacaaacaaaccatctctacaaaaaatacaaaaatcagctgggcattgtggcgttcacctgtagttccagctacttaggaggctgaggtgggagaatcgtgtgagcccaggaggtgaaggtggcagtgaaccaagattgggtcactgcactccagcctgagtgacagagccagacccagtctcaaaaaaaacaaacaaaagaaacaaaaaatgtcccaatatcaattgtaatggttgcacaactctgagtatactaaaagccattgaattgtaccctttaaatgagtgagttatgagttatatgaattatgtcttaatatagctggtaaaaataagaatacacactccagaaacaatgcctgggttcaaaatcttgctccattgctgtgaccttgggcaaatcatttcacctatgcctgtttcctcatctgccaaatgggaagaataatagaacctacctcatagggttgtgagaattcaatgaactcacactaaataaaacactaagccgccacatgtttaaattctatcattaacaaagtgagctccatgaaggcaagggttgtctctgttttgctgataattatctccagtgcttggactctaacaagcaatgacatagttaaaaaattaatctggccagccacggtggctaacgcctgtaatcccagcactttaggaggccgaggaaggcagatcacctgaggtcaggagttcgagaccagcctgaccaacatggagaaaccccatctctactaaaaaaatacaatattagctgggcatggtggtgcatacctgtaatcccagctactccggaggctgaggcaggagaattgcttgaacctgggaggcggaggtggaggttgtggtgagccaagattgtacctttgcactccagcctgggcaacagagcgagactgtctcaaaaaaaaaaaaaaaaaatcaattttcccagtatcagtttctactgtttcaaatagctaaatttcaactgtttctcaacaacttaaacttactactgttccatgatattcagaaccactgcttacttcactgtctccatatatttacctaccactgacaacccaaattgcccgaaacagttggctttaccttcatcctttgtgacttaccgaaagtcagtttactggatatctgatattttcacctgcctagcatccatggctcttcagttttcctctgggaactattcctttcctattgcatgctattttcacaggattgcctattaagataactcttctgccttttagccaaagatgggcatgtgaccccagccaggctaataagactctagaattcgattcttgagcagcacagcacaaggaccccaaaaatgggtccttgtttgtttgttttttccttttgttttatttggagatggggtctctgccatgttgcctagctggtttcaaatgtctggcctcaagggatcctcctgcatcagtctctcaagtagctgggactacaggtgtgcatcactgcacctggcttgggggcccatttgtttttatggtctaaaaggctgtccgtgtatactaagcagacagggaaaggcttgatattttggacaaaggaaactcttactggactcccagaaattggaggacagttgcaagctcaatataggtaagcagtaactgtgaaattaggtgggcagtagggagatatgtcatcacatattcctgggatacgtaaactataactcaaactatataagaggaaaattggccaccttagatgcatgatgatactaaaagtacacgcttattgtgtgtacacattgaagtgtacagattaagtgtacacttaatacttaggattaatacttaggattaagtgtacacttaatacttagtgaggattaagtggtatctcattgtgtagatggcgtgagagtaatggaaatttaatattgattagaaaatacaggccaggtactggagctctatggaaccaggaatttgaaggagagtgaaatcgggagaagtatggggaagagagatgggctgataggagagaatatgggggtatgggaagaaaatgaatttgggggctggagtgagtttaatattggagacagcagtgatggggtgagtgtcaaggaagactggagtacaatattgagacaataatcaagtatttggggaacaacgcaataaatactgaaataaggggatcaaatggggctggatatttaggagaatattgaagccaatattaatattgtagaggcaataagatctaataacagtatagtcatgggaaccaggtgttggaatctggggtagaaaatggaggcccagaccaggcacagtggctgacacccgtaatcccagcactttaggaggctg[136 bp omitted]gaggcaggagagttgtttgaacccagtggcaaaggttgcagtgagccaagatcaggctactgcattccagcctggggcacagagtgagtctcagtctaaaaaaaaaaaattagctgggcatggtggcacgcacctggagtcccagctagttgggaggctgaggcacgagaattgttcgaacctgggaggcggaggttgaggtgagctgagatcatgccactgcacgaaaaaaaaaagaaaaaaaaaaaaaagagaaaatggaggcccagattttgtggcacaaaaagggccatgatattgtggaacagtgactgaatattgaggaacagggacctttggttttgggaacaggaggaggagtctactatcaggagattgacggaggaaaggaagctgggggatcacatactgagtagtcactaagggactgtatgagagagaacagggcatgtatgaaagggaaacaatgagatcaaatgtttggagagcgctaggctatatattgggagtccgtgagtactcaatactaagcgatagcagaagatcgaatatccacgattgaaaggtggaaaccagtgagggataaatattgtggtcctttggagacatttttttttttttgatacggagtctcgctttgtcgcccaggctggggtgcagtggcgcgatctcggctcactgcaagctccgcctcccgggttcatgccattctcctgcctcagcc[222 bp omitted]gtgggggaattgttgtagtaaagtgtgattgtaaagcacaggctgacattggggaaccgtggatgtcatacttgtggcaccgaaacaagtgtccgggggcaagatatcaaggcacagagtgatatgggattatgggaagtcagaactgagaaatggcaaggccctgatattggaaaacagggcgtttgtaaagacccagggggaaaattccagagcttagctggggggccgtactcggtcttcaaaatggaggcaagtggaaacgaaatactgaggggcagtaggtaatgccacaatgggatagtggctgatctgccataagggatggtagactcggatactggcatgttgtgaggacctgacgtggagaaagatgccattgaagggccttgtagctatttagtggagggagaggctatattttggaatgctgggtcacaggattaagtctgttttggagggacagtggggatgctgtggagcagactaggaagtttggcagaagaagttagaagagttggaaattaatggagaactgaatatagaggagactgaaaaagataatttattccatcagaggcatcacaattacagattacagacatttgcaagtaaataatatgcagggttagagcgctgcgttttaacatttaacattcatgagtaaacagagatggccggtgggtaaatatcttgccaaggtggttcctggtattaagccttttgagtcttaagatgacaaatccctagggatcaggtggttttcccgcacgaactcttgtcaatgagaaatccctcagccccttttgtcttgggtctcacagctccagaagtgagccgggccagaacgaagccatcctagagtccccaaggacagccctcccgtggaccccggctagggcccccagagtctcatcctcaggagtgcgccagctctgggcctgcgtgccggcggggtctgcagccacaggtcccgcgagtcccggacacttccaggacgtggtctcctggtgagacagctcctccgggtaccagtctcgactcctccgggcagcgacaacaaagtctaaggcaggaaaaacacacagtcgtggtcagccggagcccctgggggcgcagcacgacaccccgacgaacgccacttaccgagtcccgccctccagcttcgcctgctgcgcgctcttgtcctctctcggccgcgccaactctggggcacagctggctcctcctgggggcgatgcagcatcacagggctccggcccaccccgggccagggcgccgaccctccctgccggaccctctctagaaggccgcgggtctgggtctggctcatcccttaaagattccaagattgggcgcactctgagctccccaaacacaaaatgatgggatccctgcgcgtgcccccacgtcacagagtggtaggggtccaggggcattctaattataaacggggctcaatcacaccccaaaattctaaacgcctccacccctaacctgcaggtgcaaacagcacccctatttcattgccggcagctactttgtactttcgtactgatagacaaagatagtgacaacaaagacggaaagaaacaagcatcgaaagctacatgaagggggtgcagcgctgttctaaaacacaaaatgccgagccccgttttccctttccctccccgctcggtcctgcgcccaccccgtcccgcgctggccactcaggcaagctgtaaatggatataggtaaagatgcaggaggtgatggagaaggcgatggctgcgtagatgaagatggagaggtgcggaaaatggtcgagatagcagccctcgtccagtggaggcgcctccttcttgggcggggggcgcgatgcggccttcgggggctgcccggcgcggcccccctgcgccctcccgcccgcgcgccgaccagccttcttgcccgcggccgacgccgacctgggcccgcgggcagcgggagggtcttccgggggaggcttgtcaaacaggccttcggactcggggtccgggcgaatctgctcgagaccccagggtctgcgccgaaagagcccgtcagccatgggcaggatcgcgggtaggtgggtcagccgggtctgggtcagagcgcagtgggcggtgggcggggctacggctgtatttctagcgacccgggtgggggcggagccagaggggcagggggcctctgcagggtccgccggtcctctcagctgaggcgccgcttcgcctggctcctccttccgcccccagcctgttgcagaggctggctcgccgggttccagctccgctgcctgcggctcggcagtctctgcgcagcaaggtttgtctccatggcaaccagactggcggcgcaagggggaggaaacgcgagccgctggctgggaccccggggcactagtaggcttggcacctaagaagccgaaatgcaaccagccaggctctcagctgcgtggggagcttccccagggcatatttctccttttaaaagaaatatttattgtgtggtctgttttaaattttaatcttaatgcgtgaaaaagctaacacatcatctttgtagaaaactagaaattgagaaaacagtgtaggcaaaatcagtagtaaaataaagcctcccacaatcccaaggtccagagataatacagctcaagaattggtgcatttctctgccttcttccttttttttctctgtctctccatctgcatctgtatgtgtacaacctgttttctcttcttgctcttcacccacaaaagcaggcatccagccttttgagcatctcgcatatgattaagaacaaatccttcaaagacctgcctcacctaagcccatttctcagacccacctgcggtctactcaggcctccttgtcatccaccaagccctctctggcttcattggtactgccgcaggctgctgggcactagtatctcctggcgtctctgttgcacctgaggttccacggctggctggtgttccttcctggaatggagggagaacaatcacttggatttatttgagtcccagtagattggagaggtccactggccggctttgttagttgcagcaaatccaactcaaactgccatcagagaactccctgcctcctgcaagtgaaaggccccggggtgaaccaaggccaggatgctgaaacgctgtaaccagggtgctgttcctctctatcctacagcgttgccagggacttcttgcatggccagagcctactaggtagtggtaggtactcaggtttttgctgaatgaatgatgcagtgaataacggcagcagcaaactctggttctcacagcttaaccacctcagctaaaagggcttccagttggctggatgaggagaagatggaaccctcatccgtgatgttgagaatgtaaaatggtgcagttccttttttttttttttttgagacggggtcttgctctgttgtccaggctggagtgcagtggagcggtctcggctcactgcaacctctgcctcccaggttcaagcgattctcctgcctcagcctctgagtacctgggattacaggcccacaccatcatgcccagctaattttttgtatttgcagtagagacagggtttcaccacatgggccaggctggttttgaacttcctgacctcaagtgatccacctgcctcggcctcccaaactgctgggattactggcatgagccactgcgccaagccgggtggaagtatatgaagggtgaaattgaaaggtgtggagggtggaatggaaggatggtttaggtggagtgaaagaatgtgaagaatggaatggaaggttgcagaaggcagaatggaaggacatggaaggaccagagagtgaaaagtggaatgagaggatgttaagggtggcacggaagagcttgaaggatgtcatggaggggtgtgaagggtggaattgaagggtgtgaagggtgaaatgggaggttgcttagggtgaaatggaagatgtgaagagagaaacggaaggacatgtagtggactggaagagtgtcaagggtggaatataaggtgtgtaaggtggagtggaagaatatgaaggttgtaatggaatggcgtgaagaatggaatgaaatggtgtgaatgaataatggactggaagggtgtgaagggtgaaatggaattgtgtgatgcatgaatggaaggatgtgaggctagaatgaaagggtgtgtagggtgcaatgggagggttttcaaggtggaatggaagggtgtgaagggtgaaatggaattgtgtgatggatgattggaaggatgtgaggctagaatgaaagggtgtgtagggtgcaatgagagggttttcaaggtggaatggaagggtgtgtagagtgggatggaagagctttatgtaaggctgtggcattgagaaagtcacccaaacctacctatgcagcttaagtgggagtaggtagtggggaagtctcagtaaccaagagggtctcgggcagaaccatgcaaaggcttattggggaggagctgggtgtcagtgaggagtgcaggtgttaaaaatgctttagtaactgcagggtcctttgcatattgagaagatgtgaggctaaatccggagctcagacagcagaggcccaggtgtctctaggacaccttattattttttacctggtctacctgtacagaaatgaatatatcacaaaacagtgctggtcccagcccaggtgacccctgggggctctgtctgtcaggaattgagagagcttggctgactccatggcctcatcctggtgcaagctatgcctatgcccagcaacaagagctaacttcgtcccagcccagggacttcaggaccactagacatccctgacaggacagatactggaagatcccaagctacaacttcacactctgctcgacaccagagcgttccaggaaaaacctcatgagtccagggcctggagccagaatccaccaaaaaaaaaccctgaatggacaaaggctacctttagctcctgcttctgggacctgcccagagtacatacccctctcagaggtgagagaggcctcttctagggggatcttttctccggtgctatactttgataggtttccttcatccatttaggggtatttgcctctggaagaaagatacactgtctgagtcaataggaatcagagatttgagtctgccaggccaaagcctggatctggacaatggccagttgatcatgttggtgaccccctctatgaggaatcctaggacacacatggatgatagcagcagcagcagcagcagccaatcactggccaccgactgtgtgctgggaactgtgctcaacatttctgcagagatggtctcacttaattttcatgaccccctaaattaggcaccagtattttctccaatgttccaatgaggaaactgaggctgagaggtgaaggaatctaaaatctgccactaatactgactgctgggggccgggtgtggtggctcacatctgtaatcccagcactttgggaggctgaggtaggtggatcacctgaggtcaggagttcgagaccagtctggccaacatggcaaaaccccctctctactaagaatacaaaaattagccgggcatagtggcacatgcctgtaatcccagctacttgggaggctgaggcacgagaatcgcttgaacccaggaggcggaggttgcagtgagctgagatcacaccactgcacaccagcctgggtgatagactgagactctgtctcaaaaaaattagaatagaatagaatagaatagaatagaataaaacactgactgctggggttctaacccacatctctctgacccaagggtaagaggtatacctcccaatcccctcagctacccaccccaggcttgctcaccatcaaagactgtgccctgttagcctttcccaggccgcattctgggcctcaccctgcagcaaaacagacttgttccctttagaatgtgtacacagagcaagaggcaaaattcacaaaggccacttttagctcgaagtgttcatgcccagctgaggaaacaggctttggtggtggtggtggtggtggggtgtatgtgtcagtgggtgggtgggagagaaggaccttctgggaatctctgctgcctgggctatagctatttgttatcctggaaaccatggctgccgaattcctctcctgccaacttctaatttatatgcgtgccctggctgggagaagggaagtcaagccaggaatctcccctttccacaggtcctctacccaaacccacagttgatgggaaacctgcaagtgtattgcaacctctacactaggatgtgcctggataagcctagtcacctgctgaaggtgctgtggcacttctagcccaatgcagggtcagctgcctgccccaccctgagaggcttctgggagctcacatccaatgctgatcatccccgtgctccactcaatcccctgctggggttaggggtagcaatggttgctgagcaaggcagagaaggggaggctgagtaaagcctggggctccacggggcagacagtgggaagctaagaacctgtctgggcgctgtgaggtggcacctggcaggtgggattccacatgagctgtggctccaagcccccctaccctcccttcctgcccctatgcatgctccaggtcccatcaaacttcacttacaaagcacaaattcaaagatacaattattaagagtttcaaggcactgactgccacgcattaaaccccaagcatgggggcctactgccattgcacaggttgcacttccaggaagctggccctactcacaccctatcgcaggcccagtttagcctagctgggcactgattgcttcttcctggtcgttggtgaggttctacatcaaatgattagctttccacagtgggttttctcccactagagagaacttagcgcttccagcatctcagcttcattccagggcctagcagagctcaccactctggacattttcatcctcttccccgttttctttcacacacacagacctctgctctctacatatgatcttcctcagagagaatagatttggttacttttgttctgtcctcttctctttgtgccgctcctatagaacaaaaatcatcaaacagggccaggtgtggtggctcatgtctgtaatcccagcactttgggaggcggatgagggtggatcgcctgaggtcaggagttcgagaccagcctgaccaacatggtgaaaccccgtctctattcaaaatacaaaattagctgggcatgggggtgggcgcctgtaatcacggctacccgagaggctgaggcaggagaatcgctggaacttaagaggtggaggttgcagtgagccgagatggcaccattgcactccagtctgggcaacaagaacaaaagtctgtctcaaaaaaaaaaaaaaaaatcatcaaacagccaattcagcaacatcattcttctccttccattactctatccacccagaagctgacccacactaaatggttaagaactgtgaggataatccagcaattcccctgctgggtatatacccaaaagagttgaaaacaaggtttcaaagagatatctgtacacctatgttcatggcagcattactcacaatagccgaaaggtggaagcaacacacgtgtccatcaacagatgaacagataaccaaaatgtggcatagacatacaatgggatgttttccaacattaaaaggaaggaaattctggctgggtgaggtggctcccgcctgtaatcccagcactttgggaagccgaggcgggaggatcacctgaggtcaggagtttgagaccagcctggccaacatggtgaaaccccagctctactaaaaatacaaaaaaaaaaaaaaattagctgggcatgatggtcgacacctgtaatcccagctacttgggaggctgaggcaggagaatggcttgagcccgggtggtggaggttgcagtaagctgagactgcaccactgcactccagcctgggcaacaagagcaaaactccatctcaaaaaaaaaaaaaaaaaaaaaaaaattctgacacatgcaataccatggataaaccttgaacactttgtgataagtgaaagaagcaagcacaaaaggacaatgattgtatgattccacttatataaggtttctagagtggtcaaatttaaagagacagaaagtagaatagtggttcccaggggctgaaaggaggcaggaatggggaattattatttaatgggtacataatttcaattaaggaagatgaaaaaattctggagatggacagtggtgatcgttgcacgtcgaggtgaatgtgcttacacttaaaaatggttgtaatcataaactatattatagatatattcaactaaaataatgaaaaaataactgtgaggacattttgttctccctcaaactgtcttcaaataaattaaattaattaaattaaattaaattaaaggtcttcaaattaaggccttctaaaatcaaaagaaaacaaaaaccagccattaaagaatcaagaaattcagccgggcatggtggctcaagcctgtaactccaacactctgggaggccgaggtgggcagattgcttgagtccaggagttccagacgagcctgggcaacatggtgaaaccctgcctctactaaaactacaaaaattggctgggtgttgtggctcacgcctgtaatcccactgggaggccgaggcgggtagatcacgaggtcaggagatcgagtccatcctggctaacacagtgaaaccccgtctctattaaagatacaaaaaattatccaggcatggtggcacgtgcctgtagtcccagttactggaaactcaggaggctgaggcaggagaatcgcttgaactcgggaggcgggggttgtagtgagccgagattgcgccactgcaccccaacctgggcaacaaagcgagactccgtctcaaaaaagaaaaaaattagccagcggccaggcgcagtggctcacacctgtaatcccagcacttcgggaggcttaggtgggcggatcacaaggtcaggagttcgagaccagcctggccaacatggtgaaaccccatctctactaaaaatacaaaaattagccaggcgtggtggcgcacgcctgtaatcctagctactcaggaggctgaggcaggagaattgcttgaaccatggaggcggaggttgcggtgagctgacatcgtgtcattgcactccagcctgggggacagagcgagactcggtctcagaaaaaaaaaaaaattagctgggtatggtggtgtgcacctgtaatcccagctactgagatggctgaggcaggagaatcacttgaacctaggaggccgaggttgcagtgagctgagattgcgccactgcactccagcctgggtgaccgaacgagactctgtctcaaaagaaaaataaaaattaaaataaatttgttttgtagagacagagtcttgctatgttgcctaggctggccttgaactcctggcctcaagtgatcctccttcttggcttcttaaagtgtgagaattacaggcttgagccactgcacccagcatgagggaagctattgcaaaatatagaaagtcatgagactatttatgccctttgatactatcccttagtattgacttcaagacagtgatctaaaggataacgaaaagctctctgcagaaagacgtgtattgcagtactgcttattgtggcaaaaaattggaagcaaactcaatgtcagaacaagaggagaatagttaagtaaatgatatatctactgcaaggagtcatgcaggggaagattatcctgaaaactcttaagtagcttgagggatgcttgtgatgatctaaatcaaagtcaaaaaaacaaggtttaaaaccccatgtactaggatgataacaagatgaaaatgtgttcctgcagagaaagactggaatggaaagaggaaagacagaatttttgtattgtttggataatgagatcatggggtgacttctttctcatttgaccagaacttgtgcaccatggttatattagtttctgtgcaacaaggccaaaaaaatctaagtaatggacccagtggccattttcaggattaacaatactctgtgatggtctgattcatgcccacgcagacaaaggtccttacctaaccgcctagatggccccgcattgcctagcaactacctgcttaacagcagttgctaggaaaccaagaacacagcaggactcctgaccaatagcacagcgtccatactactgctagacttcccttcaagttctctccaacagtcatgctcctgtctagcctttcctcttcttctcctattctcctccttctcattcctacctgcctggggctaacctgtgagtagcactcaatggggtccccacaatcatacaacctgacacaacacaggtaatcacaggttccagaggaccttcttccttcccctgcttccttcttgctccaggactggggcctggaccagagtgtgtgcatggctcaaagtttaaatctgtagttatcccaccattgagacaagtattgctcatggcctctatcggattctagcacctggcaaatcctactccttgggagagtgactccttcaggaaaggcattaagctcagcccagggctcccaccatccatcagagtgcctggtggaagcattccatgattcttccgtttttctgagatggagtctcactcttgttgcctacactggagtacaatggcgtgatctcggctcactgcatgagccagcacgcccagctcattttgtttgtatttttagtagagatggggttttgctatgttggccaggccggtctcaaactcctgacttgaggtgattcatccgtctcagcctcccaaagtgttgagattacaggcgtgagtcacctcgcccagccaaatccatgattcttgaatgcattctttgacaggggtccctgttccaagtggcccactttaaagagaaagaaaacttcatgtagggtggattagtctgaacacagtgatcctggaagactccaattttccaccattgttgagaatgatccctgctgccctgcacttctcattcccatcatctccatgtgctgttcaaccgtcacatccattctgaggaagttgccatctatctctattcaaaaagatctttcttctattcttcttcttcttttttttttttaaatagagacagtgtctcactatgctgcccaggctggtctcaaactcctggactcaagcaattcattggcctcagcctcccaaagtgctaggattataggtaagcacccagccaattatttttatttagagacaggatcttgctctgtctccagggctggagtgcagtggcatgattatggctcactggagcctaggctcaagggacccttctgcctcagcctccagagtatctgggaatacaggcatgtaccacgatgcccggctaattaaaaaaactggtttttttttttgagatagaggctcgctctgttgcccaggctggagggcaatggcgtgatctcggctcactgcaacctgtgcctcccacgtacaagcaattctgctgcctcagcctcccgagtagctggggttacaggcacctgccatcatgcccagctaatttttgtatttttgtagagacagagtttcaccatgttggccaggctggtcttgaactcttaaactcttaacctcaggtgatccgtccgccttgacatcccaaagtgctaggattacaggcatgagccactgcatctggccaaaaaaatgaaaaaaaatttttttttttaagagacggggtcttgctatgttgcccaggctggtcttgaactcctggtctcaaactcctggtctcaatagatcttcaggccttcgcctctcaaagtgctgggattacagacatgggtgcgtatttcgtatctccttgccactagaatataaattgcttgagaatagatactctggcctctgttatcactggcacctacaacagcctcaggctcaaagaagctaagatttactgtctgcctagtgttgtgtaccagctcgcccagaacaacttcccactcatgagctcacctagtcaaacaaccgtttgacgcaagctttgctattcccttcttacacatctgaaaacctgtttcaagatcacacatctaatgggtggtagagccaagaatttgattcccagctcactgcctgtccctcagaattctagctgttgctattagaatccagatccaggccgggcacggtggctcacacttgtaatcccagcactttaggaggccg[134 bp omitted]tgaggcaggagaat[135 bp omitted]gtgtgtctcccccatccccacacacttgtttgtgtctggcctttctcctactccaagactggctccacttcggggctcgctgccatggagacgactccagatttaggaatacatttcctaggcttccggcaactaacgtgaggacttgctgggatgagggacggggaggtctgcagaaggaggcggggcatgcgggggttgcggggcttagagggttggcggagcccctcctcgcgtaggtccttccttctttccctccctccctttctcttttctttttctttctctttctctttcttctttctttctctttcctttctctctttccttccttccttcctctttttcttcattccttcctcttcctctttctcttcctttttctttctctctcttctttcttctttctctctgttgaaaattgtttttgaccacacccagatcatactgatatttacagtatagtcctggctacaagggagcccagctgtaacttgtgaagtgggcctggtttagaaagtaacaatgaggtggtaactaatgacagtactagttgttatcaaaaattaacacctttaggtatttttgttttgggtttttgtggttttggtgcatccacaatgtcttcatagtctgcacttattccctttgcccacagaccaactgtggccattcgatctgaattctcactttcagggcaatctttctttaaatgttccacagagccatgaagttggcaaccactaccatcagcatagagtcctttgggattatcaggacaagatctagacaggtgccccatttctccacagacaaaacattctgcaaaaggacattcgccaagaggcgggtctactttagccttacacttggttatttcgtgatctgtggacccacacttgtaacatcttctagtgcccatatcttgattttcaagggcggcagggcaatccgcaattccacgaccaggttttctacaatggaaacacaccattgcatttttctttgccccttgtcttttaaatcttcttacttcccattgactgtcctcttggaggaagggttgtgtggagagtggaggtctgcatgtggtaaaggagatgggtgggtggggcgtgaaggacccgaaagacaaggccagtctcatgggtgtgtgacctgtgcggtcacacagagccctgagctcagcagggcctggcgcttgatttcatgttctgttgtcaccgtcttgacattcttatcatttttgaacgaggggccctgtgtttccattttgcactgggtcccacaactgctggagctggtcctacaggagggtgaaaattagcatataatgagcagtgaggacaaccaggagtccctttcattgccatcttggctttggtgggctttggccagcttctttaccgcatcttatcagtggagtctttgtgacctgcatcttgtgaagccagtcctgcccacctcctgtgtcacccccagcttagagatctgcatacagtaaaattactactagctttctcctgaggccctgcaagctaaagcttataccttgtgatacaggcgtgtcagattgccaccactttcctgctttataactaaagatgcttttgagtctaatacctggatagactgtgtccagcattaacctttttttcttctgttctcataaaaatctctcttattaaaaatctgtttggctttgtatttcagacaacagaagactagttttccagcctattcacttagattccaaatggcatctgatctcttatttttttctttcttatttttttaaagagacaaagtctatgttgcccgggctagtctcaaaagcctgagctcaagtgatcctcctgccttggcctcccaaagtgttaagattacatgcatgagccaccatgcttggctttgatctcttctttaaaactgggcttaagtattttatgaattatcactaggtgctatttgattttaaaaatatttgttatattcatcaggtgttcggacggttcaagtttatgtcttccaggctacaacagtttcagagaaaaataattagtccagtgttccagcctgtgccactgcagaaaagatggagtccctataagtcattcgatcaggtacgaagacatttctatgcctccagagcaggtagggatgatggcccctgttcagcatgaagcagtgacagaagatagatctctgtccttctacaacctcttaagattaaggacgagtatgtaatgtctgaggtggggataagataggaggttggcaggactggtttcacaaagactcctcgtataaaacaggatgtggtaaagaagccaaaacccatcaaaccaagatggtgatgaaagggacctccggttgtcctcgctgctcattatatgctaattttaatacattagcatactaaaagacattcccaccagcgccatgacagtttacgaacgccatggcagcatctggaagtttccctaagtagtctgaaagggggaagaaccttcagttccaggaattcccacccctttctctggaaaactcatgaataatccactccttgtttagcacacgatcaagaaataaccacaaaaatagccaaccagcagccagtcgggactgctgtgcctatggagtaggtaacttcttattcctttattttcattttttcttttttgtatttttttaattcttaaatttaagtaaaaaatttttaatttataggggttttctggtaaaaactggaaagcctgctagacaaattctaaaagagctgtgatactcctttattttctgaataaacttccttccactttactctgttggcttgctcttgtagatcttcctgtacaaagccaagaatccacgtggcctcccacgctgaaccccaattttggggctcaccctgtgacacagccagaggcaaatggttccatgtccctcctattcctctttgcgcctggatgggatccggagggctctaggcttggctgctgtggccaccagatgaggctctatgaggtctgcaggggtcttgccagctccagatggacattccctgagatgctgttaggccacctggactggggccccctgtggcatccctggcatggacacataatgcccagcaaaggcatcatcaaagttccattactttagtgctggaaggcaaaccagatggcaacttgtttgcagagaaagaaactgagacccaaagaagggtcagccaaagccaggactcaagggtcaagggctggtgttgatacttcagctgctgagtggcaggagtccctttttgctgcccttctcccagagttccataatgaggtgaggatgggtctccttcagggcttggtagagtccatctttgcacttccggtcccaggactggctcaagctgaacagcttccgcatctggctgggcctcgtgttctcagccagcaccctctcgtactgctcctggctcagcacctgtccatgcagtttgtccaagacaacctccaccgatgtcactcgggctatcagctgctctcgatactggtccacaaagtgcagcaactgcggggcatccagaggtgaaggtacggctggcaacgaacaaagaagggctccaaccacagcctccacctccaatccccaccttcagtgctttcctctctcatctctgcatccctcgcttccttctgcctccagaaatgcacctgtgtcctccctcatggcagcatctagcttggcattctgccagagtggggatcgggagtggggttcctgctgggcacattggaggctgtcagataaggaattctagggtctctgtggataggacaagggggtatggggagcgaccatgcaccgctctccagggcctgactctttgtgaggtttgcagtgatgagtcccttcctttctctcttcccttcccccagaaccagacagtaccccagaactgccaccgcctcctgtggtctctgagagctgttactgacctatgcgggctggagggatcagagtagttgcaggcatgagatctcctggaggaaaacagagatgaagatgcatctgaaacagtgctaagttattaacacacatggtacacctccaagctcccactcacttctgagattctttgatttagaaaaaagccacagacaaattctggtagaatctggagtaagagctggaagggtccttagaggttatttaggtgaatcccttccttatgcatatggggaaactgaggctcagaagctgtgatcatacagtaatagaagacatccaaatgagcgatagcaatttctcctataacatcccagacttggttttaatcccgtgttggcctgaattgtatccctggtgaactaaccaaaccccttgctagatagcttgaactatttagcacctccttgtctgagcagaaatctacttccttgttcttgtttagccttctagactggcaccaaccaaaggtgtacgttctggatttggatgtcagaatctagaatcaagatcaagcaatcttaggacatgggaataacaaattaattttaacagaaaaaacagacaacgacaaaaatgaagggacttaaaaattgctttgcaaaggagagaaaggggaagttcacagcagctcgcatgtacaaggcctgagagtctgagcaggctctaagttcagtgtgatctcacagttcagggaggtgggcacaggggagggagttcaggttgtggtaccaggagcaccgggtccatgtaggtggagaaaggagggtgtttacatgctctctgctgactggacagtccaggggtcaattctgactcattcccacactggagcatctactgagggaggtgactggatggcaaagaatttacaaaccaaaatagaagaggaatgatggaaggagctgagatgtctaacttgcataacaagagtcatcaggaatgctatgaccacagtctttgagaatctaaatggctttttagatttaaggggaaggagatagactttttctatgagttccaagggacagaattaagactgataagaggcagagattggcttaacatgaggaaaaagataacattgctacgatttgttaaggattactgcatgaggcatgtatagacatcgctttgtttaatctttccagcattcctacaaattagtcattatgatcctctttttacagacgagggactcaaatgaattaagtaattttcccaaggtcactcagcaagtaagtgccagagtgggatttgaatccaggtctgaagctggggctggttagttctccatctgtggttgcacccaagccaggattcagtaaagcccatcctctttccactacactgtgaagccagcttgttgcagctcagaggtagattcaccattttttgagagctgactagggatggttgtcctagaaggactgtttgggggtttgggttcttagattgttggtactagactaagagtccataaattttctctatcccagaaaatttattatttgatttcctcttgcctacctcaaaaatactgagcgatacaggggagagtatctgaaattgccaaatcggtttaacccatacgaccatatgactatctaggtcttattcttccacctcacacccaaactatcatgagaaacttagctaaaagctttgtgtatgtcgacatctgttaattcaagggcactgtgaagacaccattgtgcatgggagagaacataaattttagagggtcagattgagtcaagtttaaattctagtcataacaactgttatgtaacttgagaaagccacctacctcctacctcctgtgggctatttcttctcatcaataaactgtgatagtgcactctgcacccccccccctcccacatacacagactttcttccattgactttttctttttttttggattgcagtcttgctcttttgtccaggctggagtgcagtggtgcgatctcagctcactgcaacctccgcctcctgggttcaagcgattcttctgcctcagcctcctgagtagctgggactacaggcacgcgctaccacgcctggctaatttttgtacttttggtagagatggggtttcaccatattggccaggctggtcttgaactcctgaccttgtgatctgcctgcctcggcctcccaaagttctgggattacaggcgtgagccactgtgcccagctccttcattgattttctttctcctcccacctctgagttctctggaattgtcctggatttacctggtttcaccaaggcctcccacaccagagtctcatctttcttgtctttcacttgcagcctgatccctgatcccaagtggccaacgtagaactccgagaacagctggtcttctccagggcttcgatagcagagctccagttcctgaagaggcaaagagttgagttgccaccctgttcatcttgcatggaaggtctttccccacctgacaccttcttggccctgcttggctccataaggacactctgatgatccctgtactgaaatcaaccatcaccttcagacattgctcttttcccaattttccacagaaggatgaggacacaactgagtacctcacgggtaagtcagggcttgtccttaaacgtagtgctcataatcctaagccagatccttcttccttcacctcccccatcttgaatccaaaccctcatttctccagcccaaagcctgtcttcccaatggaccctaaactccacccactgtcgattgacaaaaatttatatccatcccctttcctaaatcccagctaagacagaactcttgattccccactgtcttccaaacatgctccctttccagtttccccaaactcagtaaaggataggaccatccactgagcatgcaggctccaaactcggaatcatgcttaagtccttccctacacaggcaatccagcaggtcctgttggctctgccttcaaaatcaaccctgaattcatatacttttctccatctccctcgctaccttcctagtcaagtgaccttcaactgtagcttgcagtattgcaacagccttttgtttttttctctttttcttttttgtttcttttttttttttttttaaagagagatggggtttttccatgttgcccaggctggacttgaactcctgggctcaagtgcctcagcctcctgagtagctgggactacaggcgtgcatcaccatactcattttttcatttttcatagagatgaggtctccctacatggcccaggttggtcttgagctactggcctcaagtgattctcccactatggcctcccaaagtgatggaattacaggcgaaagtcactgtacccaaccacaacagcattttttttttttttttttgagacagggtcttgctctgttgaccaggttggagtgcagtggcacgatctcggctcactgcaaactccacctcccaggttcaagcaattctcctgcctcagcctcctgagtatcagggtttacaggtgcccatcaccactcccggctaatttttttttttttttgagacggagtctcgctctgtcgcccaggctggagcacagtggcacaatcttggctcactgcaacctccgcctcccaggttcatgccattctcctacctcagcctcccaagtagctgggactacaggcacccaccaccacgctcggctaaagttttgtatttttggtagagatggggtttcactgtgttagccaggatggtctcgatctcctgaccttgtgatccgcccgcctcagcctcccaaagtgctgggattacaggcttgagccaccacacccggccctcccggctaatttttgtatttctagtagagactgggttttgccatcttggccaggctggtctggaactcctgatcttaggtgatctgcctgccttgaactcccatagtgctgcgattacaggagtgagccaccacacctggccttttttttttttttttttagacagagttttgctcttgtagcccacactggagtgcagggggggtgatcttggctcactgcaacctctgcctcccgggttcaagcaattctcctgcctcagcctcccgagtagctggcattacaggtgcctctcaccatgccccactaattttttgtatttttagtagagacaggttttcactatgttggtcaggatggtctcaaactcctgatctcaggtgatccacccgccttggtctcccaaagtgctgggattataggcgtgacccactgcgcctggcccataatggccttttgacttgtctctctgctttcactcttgcctgcttatcat[137 bp omitted]acctctgcctcccaggttcaagtgattctcctgcctcagccccctgagtagctggcattacaggcatacaccaccacacccagctaatttttgtatttttagtagagacagggtttcaccatgttggccaggctggtctcgaactcctgacctcaagtgatctgcccacctcggtacccaaaatgctgggattacaggcgtgagccaccgcgcctggctgtaaatcaggtcttgtattagctgtttatgaccctcaaaagcttgccattgcacttagaacaaagtgcaaagtgcataccagggccaacagggcagatgaggcctggtaagaccctgcctctaatctgactcatcttttgctatactgacctcttttttgtcatctggaggcgtcaagcttgctcccacctctatgcctctgcacacattccttctgcctgaaatgttcttccacaaatctccgtgtggcctgaaccaacacccaatctaaagaaaatcttcgtttccttagatcttcctcaaatgtatgcaaccaaggcccaaatcctatagcagattctttcaaacaccctttactgagacaccccatggttccccataatatgtgttctgccactgcaatgattaataaagccagtatgttcaactacaggtttgttcctggtggtctggactgaaggacattgatgacctatagcccaaacacttcccagtgcccccaagtcaaaccccatcatccttcacatcctgcatgtgatcctccctcctccgaactttctttctcctagtcttggaagcattcccactttctctaaatcccactcactttctgttcaacctcgatttatcctgtccctgagaaagccctgagacctgccccacaggcattcattcccaggtaggacttctgttcgcagtgaagaggcagacactgggctgctcaccttggggagtatttccagcatccctgaaccagacccagacacagtgtaacgacagcccatataaagtggggtcagcgggggtggcttgtggattcgcacaaactggaatttcatttctagatcatctatggcctacagaacatagggaacaatgattaagggaggcttctgccccgtggaatgtggtttgaataggggggatggtgcatctgtgtgtttgtgtggacagagtggggctatatcacccctgcctccctccccccatgcactgctacagagacagcccgcacttggtctttgatgtcttcaggataggaatagggttattgttagggaagttagaatgaggaaaggctacagttttaggcatggaggactccaatcctttgattcctggacaggggccgtaagaaactgtccaaagatcagtgattgatcaatgaacctagcagggggataccttggagaggcaggagaccagtccaagactgagaggggacgaattgtttgcccacttcaaggttctcctgtacaagaggcccatccttggtcccagttgaagaccctctagggggctctctggctgcattttgtgtttaccgtcaacccaccgtggcccagcctttctggctcttagtgtcaccttccgaatggagcagtcacttgggatcaggtagaggtggaaggtgacttcctcaggatggacgcggtggtaaagcaacaccacagaggtgacgggaatgaagcgcagggcattatggatcattttcaggaggactcccaagggggagaagctggggttttccagaactatgtgatgcagctccaccctggctggcttctccaggagcatcccctcctctttaaagtgggccatttggaacagggatgtgtccacatggccccctgtaaaagaatggattgaagaggcacaggtttatttttatttatttattttgttgagacagagtttcgctcttgtcgcccaggctggagtgcaatggtacaatctcggctcactgcaacctccgcctcctgggttcaagcgattctcctgcctcagcctcccgagtagctgggattacaggcgcctgccaccatgcccagctaatttttgtatttttagtagagatggggttta[140 bp omitted]tttgctggcactgtaggatcccagggcttaggctcaggtaccctcttgggggagcccagtgctatggtcttgaatgtctgtgtcctcctacaattcatatgttgaaattctaacccccaaggtgatggtattaagaggtgaagcttttatgggaggtgattaggtcatgggggtggaattctcatgaatgggattagtgcccttacaaaagagactcaagggagcttgcttgtcccttccaccctgtgaggacacagctagaaggctccatgtatgaggaatgggcctcaccaacacaccaaatctgctggcgccttgatcttggacttaccaggctccagaactgtgagaaacaaatttctgttatttacaagctacctagtttatggtattttgttatagcagcctgaacaggctaagacacccagcatggggaagagggcatttctaggcctggggcctttggaggctgtgggaaattgtgccaccaggtgggagcacttagcagtgctgaactcctaagtggagctcaaggatcacccttgagccaaacttatacgcaaacccagcccctggccctggagctgggaaagatatagaacctctagttgcctgtgctggtgtggattctctatgagagaccattgagtgatgctggaaggtttgactaggcaggtagagaacaaggaggaggaaggggcagtaggaacatagagtgaccaaggtgtttggccactcactattcaaactcttctttttaggaagagcctcctcctccagcactgtgtgggtcttggcaggaggcaagccaagccccccactcaggatgctactactccctggcagcaaggacacaggtgtgtgaccaagacttgactaagtggttgtctctaactgggacctcaagtctagaggggtgaaacagatgcagagagagagaattctggcagtagcagttgggtgaagagtccagtgagaggcaggtgtggtggtgcacactcataattccagctacttaggaggctgaggtgggcggatcacttgaacccagaagttcaaggttgcaatgagctatgagtgtgctgctgcattctagcctgggtgacagagtgagaccctgtctcaaaaacaaaaaacaaaaaacaaaaaacaaaataccagaaagaaagaaaaagagcccagtggctcctgggcaggagggtcctacagtagctgtctccgtattttctgccgcctgtctccgtattttcctgatgtgaccttggctctgcccttggtttctctgagtcattgggtcactatcttcccccccgcttagatttgttgcataaccttttgctaagtctatgagttagtcaataacctttcaatgtatcccttttctgcttaaatcagccagaattggtacctttgattgcagtctctgaccagcgccaggcaaggacattgaagttacaagagagcttgagggatgaatactggtaatgggagagacactggcctagggatcagaggtcccagctccatccctgcattgcctggtaactgctgcaatgcaagtggtttctgggcaacaaggcatccagcaagctggacaaagcccttagtcagatgtcaatcccagaagggtccatgaagaccattacttaagttttgtcatttaactgcgtttttgggatgaaaataaagtcacagtggtatctatcatctgaaaaaatgaggaagaattcacctatgaatcttaccaatcaaacaatacaactattctttttttatttttgacacggagtctagctctgtcaccgaggctggagtacagtggtgtgatcttggctcaccacagcctccgcctcctgggttgaagtgattctcatgcctcagcctcccgagtagctgggactacaggcatgcaccactgcgcctggctttttagtagagatggggtttcaccatgttggccaggctggtcttgaactcctgaccttaggtgatccacctgcctcggcctcccagaccgcgcctggccacagtataactattcttagcatgggacgcctgcattacagtctttctctgcggcaacaccttttcctatttttattgtagtccatgatactttgtctcttgtttcctgtgacagtttaacttgctgcaaggatgtcagaccatttaattaccacagtatatgatccctgctagtggatgcaccaccctgtgattcagcctgtttctcatttcagtgttgagtttgcttccaacttttcaccatgataaatagcacctgcaatgcacatattctgcagaaagcttctatttcccttgtgttattgccttgaaatcaatcagtaccaagggatgaggaaagcgtgtgagatggtatgacctccttcactccccagttgcttctccaagaggcgatgctggtttgcgttgccatcactggcactaaatggatggtctcatcctgacctccaaagcactggaatgtcttcacatgtcagttgagggagctgaaatcctgggaggaaagtgctttttccaaggccacacaaccagccatggtcctaggaccagatcccaggattctgaccacagtctggagcactaacagacgctcggtgccacttgaatttttgctgaattccagaaggtgctgggtgtctccaacttaccttcttgctagggtgaccaactgtccatgcttgcccaggaccgagagggctcctgggggtgcaggactgtcagtgttaagatgagctggtcaccccccttcttgcacatactgccctttccatagattgtggtagagtcacctcatccaaacctgacagtatatttgtgctgatagattggagagagaagggaagcaatggggaagactgtggtctgaaggagaagaaggttgagtgttgactggaggaagtctcactggcagaaagacctacgctgcctttggctggttgcaccagaaaaatttagaaaaagctatcatgaggtaggcatgtttctgtgggtctggggtccagggctttgcatctgcttattacacaaaagcttactgagtacggacaatgtgccagcccctgtggatgtagctgtgaacaggaaagacatgggcactgcaattccagagcttgtggcccaatggggaatacagacagcaaatagaacaatggctcaaagcatgacaagtgctccgccaatggaagcctgtcagctccttcctcctttcccagccgcatgcccggtgtttgccttgggacattgctgctcctgctgtccaggagcctggggactctccctcctttagatgctgcccttgggcctgtggcctgatgcctggccgtgcccttcctgctgagtgtgtgtggtcagcaccttccaggctcaggtgagctgttgaggggcacagtggctctcctactcaagcagggacagtgggacccacatcacatgaaggtagggcactagagggttgtctagcagagcagctaaatgatagggactgcctggctttgactcccagcaagggttcttaccaactgtgggactctgagcagattacttgccctctctgtgcatcatctgtaaagtggggctgataacagcatccccctcccggtgtcactgtgcagattgactgggtttgtgtctataaagccctggggataataaggaccacttgctcgtattacagataaaatgcagcttgaccaatctatccacctggctgtggtggttccttctgtttcttcctcaaacaactcggcccagtcctcttggtaactcttggggtctgggaagaaaaagctactaaattttttttttttttgagacagagtcttgctctgtcacccaggctggagtgcagtgcacgatcatgactcactgtagccttgaccttccaggctcaagtgctcctctcacctcagcctcctgagtagttggaactacaggtgcgcaccaccatgcctggctaattcttcaatatttttttgtggagatggggtctcactatgttgcccaggcttgtctcagactcctgggctcaagtcatcctcccgtttctgcctcccaaagtgttggaattacaggtgtgagccactgcacccagccactaaggtattttgaatatccattttgcttaatctgagttttgggactctatattgttatacgattcagtaagtgttggttccaggaagacaacagttttgaggcctgagggataccactgtggtttccagccatctcatctggttgaactcctgagtaggtgggcagggggagggagtgggaatggggcgagaccccactcaggtgtctgtgtgaagtgttcttgttcccacaggcagcacagagaggagcaagtgtgacaaaaatgagggaactcacttcctcttggagggagggttgtgtggagagcagaggtctgtgtgtgctgaaggagatgggtgggtgggggaacgaaggacccgaaggacaaggccagcttcatggatgtgtggcctgtgcagtcacacagggtcctgagctcagcagggcttggtgcttggtttcatgtttggtggtcttgacattcttaatcatttttgaatgaagagctccgcgctttcattttgtgctgggccctatgactgctggagctggtcctgcaggagggtgagaatgcccattgccacggtgatgaagctgagaggctgaaagcctcaagctctagctatagtgggagaaaactcaccatggaaagttaatgactcatcacccgttcagcgacgacagtgatgaagcaccagtgcccaagtcctaaatcagaccctgtgtcaggcagtgaggtcatcgtttccagggcaatgaacagctgcagcccagacagcaggcagcaagcatttctggaaggggccctgcccggccccagggattggtttcctggctggtcacagctagctaaaagcagcctctgtgcattttgcctcttgttctgtggcaggggtgtccaatcttttggcttccctgggtcacattggaagaagaagaattgtcttgggccacacatgtaaaatatactaacactaatgatagctggtgagctttaaaaaattcgcaagaaagtctcataatgttttaagaaagtttacgaattcacgttgggcttcatcgaaagccatcctgggccgcatgtggcccacaggccgcaggttgtacaagcttgtgtacggagtccaaagggagtaaatcctatctggccacaaggtgaggctcagaatttggtctagagaaggctagtgggacatgggcttgggcaggactggggaggggtaggggtgtagctcttagcctgggataaacaggacttgggatagaatcccaactctggaagagggtcttcacctctctcggcttcagtttcctcactggtacaccaagggaaaactgtagtgcctaatttcccggttcattatgaaaaaagagatgatattaatatatacggaactaccttgcatggttccaggcacaggatgctcagttattgttcacagttcttattggccaagttccagtgccacaaaggacagtgccacaagcacagtgaattcattcctattctgatttggctgtcagcctggcaggcttcagctagatgcctgtgcactcggagggtcacccaattccttggacaaatcccgtctcccaggcccacttgatgcacgcaggagactgagcagggcatggcctgggagtcctcacaatggggagggccagctcatccacctctgagagtggggaatgagggggcgctggagcaggacctgaaggcagactttgtcccctcgggccctggtggtacattctggctccagaccttagctgcatgaggtttctcctggaataccctggttagagcagggagtggtggtgcagccctgagcatcccaggttggggcaagccaagttcttttgctgctggtcatgggcagagctacgacagagctgagcccactgactctattagccaggcccctctcttcttgatagagtacctggggatccctggccacggtctcacttgtggaagaggcaggctggttgtggtagtggctgtgttcattactctatagattgcccggtgggaacaagtaacttgtcccagcttcttgtttcagccatcagtttcctctcctcaatctcttcctttctaaatggacctctacaattccagagctgtcttgcacctcttccctctattctgttttagtctgggaccttccctagggaatgcccatatgaccctgactgttcaaccaggtgccccagggatcctgaggcccccgggactctatttccctgccccatgctctcctcctggtgtgcagcttgaattgtttactgaacttttgtggcctcaacaaacaagactttcctggttctgggtactgagcagttccctgctttttatttttctcatttgatttttctctttctactagcttctaaataatttttcttatatatatgccttgattaccttaatatatgcatactgtaaagttaatacctttattttgaggtgatactaaaaatacattgaactactgggatgatactacaacatatcaactaacaaatgagaaattaaaaataaattctcatttacctctattcctgggaaataaagaaattaagacaagaaaaaatattaaaaacccatttaatatctagctaaactgtacaaatcataaaagtgcttataactgatgtaagctataacataaattgtttatcaaatcattttatcagcaattaaatgaagcttctattggagtcatgatttgacatggggacacatcagattcttctaacttgctcactaaattgacagacattggctgggcacagtggctcacacctataaccctttctttctggctgatgtcaaggctttccctcatactttcttattctgtagtttcacattaatgagactaatcttgattttttctctcccttctctctctctttcctgcattgcagttttggggattctcattctgagaagtctcatatgtctcaatacttccagaaatttgtttgcaattgtcttgttgaatattctatttttttcccttctatcttatctttctggaattccatttagat[136 bp omitted]ctcctgggttcacgccattctcctgcctc[132 bp omitted]cggcctcccaaagtcctgggatcacaggcgtgagccactgcgcccggccttgttttttcattttttttagtcaatttagtttccaactttgatttgtcatttttaatggttcattgctttttgctgatagttttaaggttacttttttttttttggtcatattatacacacttattttatgttctttttctgataatttcagcatctgaaggatttaagggactgattctggtatctgtcgtttctgctggctcttacttctggtgccttgtttcccctttgtgagatttttgactgttagctgatatttcttggaactctgtgggaagtctttggaggtgacataaaatcatactttgtgattactatcttctatgggaagcccctgtttcatggctccagctctcagatggcgtctgatgacactgtttcttctccctgcctgtaggagtagtgatggcttcctattgttgctagtccctgttgccccaacattcttcgttagttcacttagccttactttgtaaatggtcctgtctttgaaaagcttcttcaaaaatctcaactgagcatatcatctctttcctgctgggaccttgagtgatacagtctatataaatgacacttaataaaaactttcaagtaagtttaggcagatataattatgaggctgggagatgtgtttcaaaaagataagtccagagaagagtggaatgcaggaaaatcttagtccccatctccataaccccccctcggcccctctaaggaagccacaacaccctctcccaggagattatcattctacactccctttcaggcccataattaccaccaccttcctccctatccttccctgttgtttaccttggagagccacaaagtgagggaggtgcacagcttccacagctccaggctcagccttgatgtccagcagaggccctgccaccatccagctgtgctgtgggttgatctcacccaggaactggtcccacacacagaattcaatctcaacggtcaccgcttctctcatcacaaagcagagacccgtgttgggccagcggtaggagccagctacagggaagtgaactctgggaagaagagggagaggcagacacttactgcacgaactcactgagcacctgctggatgccagaccccatgcaggggcttgcggatacggtacagtggcttcaagcccagacttcggaatcagatggacttgcattttagtcctggctcttctgctcttgactgtggatccctgagcaagtcatttaaccttcctgtttttggtttcctcatctgtaagtaggagtaattatagctcccatctcctagttacgagaataagtgacttaatgcatgctcacagcttagtacacgcctgggagctgtgaactgtttctactatgttgatgatggcaatgatggtaatgatgaaataacaagtgttcgtatatgtaaggggcctatttagcaataattaataacaatatatgtgctaagattatctgtcttgtcttgtctgtctatctatctatctatctaatctatctaatctatctatctatctatctatctatctatctatctatctatctatctatctaatctatggaaatatggtctcactctgttgcccaggctggagcgcagtggcccgatcttggttcactgcagcctcgaaatccctggcttaggcaattcttccacctcagctccctgagtagctaggactacaggtacatgtcaccacgtccagctaatttttttggtaatttttgtagacacaaggttttgccatgttgtccaggctggccttgaactcctggactcaagtgatcctcctgcctcggtctcttaaagtgctgggattataggcatgagccactatgcctggccgtatgtgctaatattaatgctaaacccttagaattggaaacaacacttttatagagatcagaagtgattttcccaaggctcctcaggtgggttaatagtgggtcccgggatgccccagcttctgtaggtgtgagctgggagtgacgctgtctcctggttgagatgatgtctgtggcagtgtttggtgagtggtaacatgttatataagagatcatgagtatgactatagagaattactactagtgcgactgtaagccctgggagggcagggctgccatattcatcttagggtccccagctactagtacagtccttagctcattagtggctgttaataaaacaggagcatacagattaagagagttaagtgagatttaagaaatataacaaagaaaataaa[139 bp omitted]tatggtgaaacccccatctctactaaaaatacaattttcatttttcacacgtggtggcatgtgactgtagtcccagctactagagaggctgaggctggagaatcgcttgaacctgggaggtggaggttgaggtaagccaagattgtgccattgcactccagcctgagtgacagagcaagactctgtctcaaaaccaaatcaaaccaaacccaaccaaaccacaacaccaactataagaacatgttttagacaattgagcaatttgaatatggattggggagtagatgaaatgaaagacttactgccagctttgtcagatgtgatattggcattgtagttatgttatggaagaaaaggtttttatttttgttttttgagatgcgtaatgaaatatttaagggtaaaatcacccgatgtcttggatttaaaatactgtaacaataacaaagagggggaaagtgaacagctgaaacgaatttggcaaaacagtggctgaagctgggtgatgggtacatggaagctccttgtactatttttgtatatgtttgaaaattttaagtttcataagaaaacatctttttccatatgaaaagcagacacccagtgtctcagccctgtctctgcctgttgtcttggcaagaggaggggacccagtggtgagtgtgagttgggggtagggggtggcgctgactgtctgtggggacccaggatgggcagtggggtgcgggaggccagcctgggaccagcagagccccctcactcaccggtacaagttcttttctttgtcaactacctcagtagccacaggccccgtggggccccagaagtcatcgtcagtccccaaaggcttcgtatgcaggtccccttgagaggcaggagaaggcacgcacaagagttccaccggtactacctctggggagctttcctctgaaacagcaaggcagcggtcagctccagattctcccgcctggcctcccctagcccctatggctgcactgtaaggggcccttcccaaggctggcctgcctggaccatggcagggagtgtgtctgcagcttctgctcctgctccatggctgcctgcctgctgtctggggagccccactccagtgcctccagcccagcctccgcccatctccccttccccactggaatagaagtgccactctccccagcatgcccaggtgggcaggttgagagagaacatggttcaaaagatgaaaggggccaggcaccgtggctcttgcctgcaatctcagcaattgggaagatcttgctcacgtccaggagtttgagattagcctgagcaacatgggaagccgccctctctacagaaaaaagaaaaatatcagccaggcatggtggtgagcatctgcagtcccagttctactcaggaggcggaggtgggaggattgtttgagctcagaaggtttaggctgcagtgagccatgaacatgccactgcactccagcctgaacactagagtgagactctgtttttttttttttttttttttttttagatggcagggcaaagatggagatgtgattcccaggccttagcagccaagaatggaagaggccggaccccggttcagggtttgatacatgccatagacgttctggagaggggaagcaccagccggtgggtctcggagagagggtaacggaaatccagccagttcctaggagtgggagctctctcgtgggggtagcaccctcttgggtaggaaacctgccccgtcccacatcaggggcagagggatggagggaatgacctcccacagctgacctcccccaacccctgtcacgatgctcccagccttgccccttcaaactacctgatccgagtctctgccgcttgagtgaggatgtgctattactcatctctcccgtatccaggccctcagtaggggtcatcacacttggtttcctggacaaagaattgttcattctgcctaagatcttggaggaagcgagggctgtccacatgacattcccactaaaaattcaactcctcctcgggtcgggtgcagtggctcatgtctgtaatcctcgcactttgggaggccgggatgggtggatagcttaagctcaggagttcgagaccagcttgggtaacatagtgagacctccccacctcatctctgccaaaaatacaaaaattagctgggcatggtggcatgcacctgtatcccagctacttggaaggctgaagtgggaggatcacttgagcccaggaggcagaggttgcagtgagctgagattgtgccactgcactccagtctgggtgacagagccagaccctgtctcaaacaaaacaaaacaaacaaaaaaactccatccgaatttgaactcaatcctgtggttcttctgtggtccctgtctctgtgagcagcctccatccacccatgcatccaggctagagctggggtgtcatcccaactccttcctcgcccaccctaagagctgatcaccttgacaacacctctcaaatagctcttctttctattgtcttctctccacctccatgacctccacctgagtcccaggccctggcctctgtggcccgcaccactgcagcatcctctgaaaggtctccctgcttctgctcgggtccctctgccgcccattttctacacagcagccaatcttgaaataggaacctgacccatcacttggctgctgcaaccctgtaatgtcgcttcattgcttctgggggaaaatggaaagtttttaacatagtccaaaagggcttgccagggcctctgtcaccctccaatgtcacctgggccactttttcctggctcactgacctctagtccatcggttctcaaactgtgcgcttaacaatcatctggaaggcttgttaagacacagattcagccgggcgcggtggctcacgcctggaatcccagcactctgggaggctgaggcgggcagatcacaaggtcaggagttcgagaccagcctggccaacatggtaaaaccccgtctctactaaaaatacaaaaattagctgggtgtggtggcatgcacctgtagtcccagctactctggaggctgaggcataagaatggtttgaacctggga[133 bp omitted]agtggggcctgagaatttgcagttctatcgagctcccagtgagggtgatgctcatgctgctggtccacggaccacagtttgagtagctgctcctgacgcctggcctcccattcctccaggaggctaaactcttttctctctcagagcctctacttctgcctggactccaccccttcttgggcccagccaacctgtcctgtctttcagacctcagcccagatcctcttgaccaggtcaaataggcccataggtgcactcacactgaccccaggtgcatttgcgcagacacttctgggataacctgtgcctgtctccctgctggactaagctcctggaggttgggttgtgtctttcttgttcactgctgtgtccttagatccccaaacagtgcccgacacatagtgggtctgcagggaatgtttgttcaatgaataaatggctcctcttaagcctaggagctgttttccttccatttcaggtgagccacagcagccaggaacctggggacagatgagcttcatggtcaggtggaaatgcacccaactgggagaatgtgggagctgcagcagattcctcggggaagggaagatggactttcctggccccggggcttgcccctcaagtcaggggtgtgtgtggtggtggtggtgagggtggtgggtgacggtgatggcgaggatggtctttttcccagggcacaggcgctctctctctctgtctttatctccctcttgtgatcatcgctttcattgttccaaaccttctctgttcttcatggaaggattcctggactagaggccatttggtatcatgctgtgctgggtccaggggattcgctggctcacccacccactgactttttcttgttcttttttttttctttttgagatgttgtcttgctctgtcacccaggctggagtgcaatggcgtgatcctggttcactgcaacctctgtctcctgggttcatgtgattctcctgcctcagactcccaagtagctgagactacaggcgtgcgtcaccacacccagctaatttttgtatttttagtagagacagggtttcacca[137 bp omitted]gccacccagactggagtgcagtagcgcgatcttggctcgctgcagcctccacctcctgggttcaagttattctcatgcctcagcctcttgagtagctgggaccacaggcacccgccaccacgcctggctaattttttagcccacttactttttcatgttttcctttccttgtttgtctaacgttaagagttgaagcaaggggggatttgattctacttgcactgacaagtgcacctcactctggctgctgtggtgtctgggtttctccctggctgtgtttgtctctcaccccatggctctttccctgtctcctgctcagccctgggcctgggtcagccagagggagttctgggtccccccttaccgtctgctgaagatgagcagctgaggtttctcctgctccagggccctcagttcctgcctcatctcatcactcagagttgtctggtccagcctgaaagcacaaagggagccgggtcctcctgggatcccccatgtggtccccaggtccccagggcccagaatcctgggacctgtcaccttctgaggcagcggccgcagggtgggttccctggaagccaggctctgaggaggagggtacagtgaggagattcattagggtgtgttcttgggtcaatgccagggcaagggaagggagggaatcggggagacgtgggctgtgaggcagtctccaatggaggcctcagccaactctgggagatgatcctttagagctgtttaaaggagttgggttgaggggctgggcctttctaccccaacattggccagtcatcggatgtgggcctccccaggaaggagatgtggccttgggtgaggtggctctcactggcagaggctgtctctacagccggctgccagggatttccccatggcctcaaaatgaccacctcaggcctgggtcctgggattttcttcccagtggtcggaagttttgctgggaagagagagtcctggttccatcctcccaggccttgtggtctggggtttctgccagatgtgagatgctgattgtcttctctgggtctctgtgtcctccatctaccacgtaggatgaatcaatcctgccctgcctgttctgaggcccagacaaggaggcggtgaaaagaccctgtcttctgcgaagggctctgcattcattcccctactgctgttagagctgttctgcccctggggaggagcgcagaccttgaagtagaaggttattcttctcaactaagtcccggctccaggagggaaggaggtggaaacctactcgggactctagagagcaaaccccctcagaagcagcccaggtttgacaggtaagtgttgagctggggcctgaagccatatctgcctgccatggccaagctctggggaaaggctcttcagcataagggaggtagtgatagccaaaaatactcagtggggagcagcaggctggggtgcaaaggtgctgcccccttgggatggagttcccatggttgtagatagccagtgtcagctacaggagaacccaaatgtagactatttatttctgttattctgccttgaccacttctttaggtttgggaggcctggctgaggaaagcccgaggcccaggcttcccggaccccctctgagaaggctctggatgtgggggtttggagcccctgtctgctccctgagatgtggcagggcccctggcaggagccgtgggtaagtgtcaagacagaagccactcatgggcttgctcccagggaggtggaggggagcagaagtggcccagagatagtgtgggggtggctcctcggggaagggcaagaatctctggggcctacgggatgggaaatgagggctgggggctcactccactcagggtccttcagttctccggggctcaagtgcctctttgttctgggcctttccccacaccatccctaggcctagaatactctccccaacttggcctgggtacctattcctccttcagacctcagcctgacgtcactgtctcagggaagtcctccctggccctttgatcaaatcccatcctccctcaatattacattctcataataccctgtactttcctttcactccacagagctcataaatatagacttgtgcatttacaggtgaccagtgtccgtctcttccccactagagtagaagcttcagtagggcagggcccatgtctgtttggtcactattgtaccccaaggcctggtctggtgcttacacacgggaggcactcagtgaatgaatgaatgagtaaatgaatgaatgaagcgctgccctggagtgaggggaacctgagcgtcccctagagcatgcagcctcagtaatagttatcatttgatcatgcccgactctcttcccagcactgtccttgtttttattttatttgtttaattaattaattaatttttgagactgagtctcactctgttgcccaggatggagtgcagtgctgtgatctaagctcactgcaacctctgcctcccaggctcaagtgattctccctgcaagtagctgggattacaggtgcacaccaccatgcccagctagtttttatatttttagtaga[154 bp omitted]tgaagtgggtatgatactcccattccacagatgaggaaacagagtcccagagaattcagcgacttgtccaagtcacacagtgtaagtggtagagctggtaagaaacttgggttggctatgcatttatcagtcctttttccatcccctgtccgatacccccccaaccctcttccctctgcccagaagggacccacagggccttaccccaggcgtatgagtttgcaggcaggatgcctgagcccctcacagagcagtcgcacgccaacgtcatccaggttgttctgctgcaggtctagctccttcaggctggggctggcactaagcacagaggccaggtcctggcagcagtcagacgtgaggccacagctgaccagcctgcaggaaagatacacgccagcccaggtcattgtcctaagggctcgctcttcagggtaactagggtctgatcttccttctcagcatctgtggccttttgagggtctgggatgacatgcagagaagatacaaactttcctggcttgcggtaacctgagagattttcactttcctcttgcagccacggaacccctcaggatgccagcacctaccctttctcaatcctgtgtgattcacactgatccagtcccctcactctgtccacattgatgagtaacttactcaatgtcccacttgtacacctgggtctatctgttttctctttttcttttttcttttgagacgagttctcactctgtgtcccaggcctcccaaagtactgggattacaggggtgagccaccgtgcccggccggtagggcctttttagagggcaaaattagcaacatatcgttttcccagcagttccatttttcggaagttaagctacagataatatgctgggtctcaggacgcactgggggatgttaactgctgccctgtttacagcaaacactggagacaatctggctgctcataataggcgatggataaaaacatgatggtaagtccatgtagtgaaattccatgctgtgattaaaaagaatgatgtgactttgtacgtacggatgtgggaccatctccaagatatattttaactgataaagcaaagtgcagggcagagtttgtgctgtgctaccatttatgccagaaaagggctatgtacctgctgtatgttgtatatatgtaggctctctctgggggttctcctgtctggggatcctctgctcttggggtctcagccctgcttctagaactgttggctctcccagctgggtctgctcagacccagctgcagtccaagcttgtaaatgtcacaaagcattccagggccttcgctaagagagggaacagggagaatggaaaaccaggctttgaggtcagacctggcttcaaatcctggtgcagctacttcctggctatgtggccttgggaaaataatgaatctctccgagatccaatcttgtcttctgtagatgtagcgaggattaaatctgacaagtgttaccgacttcctagccgaccagggatcgccgacccctgatactaggagaggatcctcgttgtctccccttcccatgcccccttcccatcaactcttgatcaggattactgaatggggaagcaggcaatagccttgggaagggcagaggtttggccttgggaagaaggaagggacgtgtgatgtgtgaacaaagatctcgcaaggtgtaaacaaggatatttcagggcttgggcagaaacaaaagaagaccctgaaggcagccccctgagcgggtgcacagaggggtgtgtataactttgtgcatcaagggaggaggcccagcaggaccagggagaggtaactatgcactcttgtttcttttcttttcttttttaagaaggagtctcgctctgttgcccaggctggagtgtaatgaggtgatttcagctcactgcaatgcctaccttctgtgttcaagcaattctcctgcctcaggctccctgagtagctgggattacaggtgcccaccatcacgcctggctactttgtgtagttttagtagagacaaggtttcaccatgttggctaggctggtctggaactcctgacctcaagtgatctgcctgcctcgacctcccaaagtgctgggatgacaggcatgagccagggcgcctcacttgtttctacatggtggcgggggggatggctctgtcccctcggatgagatagtaaatcgaactaagtggacaccagtgatttcagctctccatggcagaaccccatgccaagtaagaggacctgttactaggcagatcacagctcgtgggaacaggagaagaatagaaaaacactgctgcaatcctcatagctctatgaagtgggcacgattatcatcatcctctgtggtagtctgtgaaaatggccacaaattctgccccctgtccccaccttgcattcacgtcccttgactcgacttggcttctcttgctgtatttggagcctggaggccccctccctctgtccaagggtggatgagcttcctcctgagcctctactgcctggctgagatcctgtaggctcctcccactcccacaaagcaggtctcaccttctctctgctcttaccctctgcctgcctcatggtggcaggcagttccctccacctccccctgcccaccaagaacaattactgcagtcgctgtagcttgcagctcggctgtctcagtctctggcaaaggtgtttggctccagcatccgtgagcacattgaagctcaggtccagctcggtcagggtctggttggctctcagcccaaaggcaaggtccttgcagtcctcagctgtgaggccacagccagccaacctgtggaagacacacacccatggtcttcaggttactcacctgttgattcaacagacacccataagcaaccattaatcacctactatgcaccaggcctgtgggccaggcagaggtctagaaaaccctcccaggccccagaaatgcacatggtacttggggatagacatagaaacacataatagttagttttttgatcctttttgattaaaaccctccaatgttttcccacattactcagaatacaattcacggtccttttcctggtctacagggctctggggacttggatcctcatcatctctgtcctcatctctaatctcttttaggtccatagtcactgcccttctctctcttccttcctcaccccaggcacagttccacctaaggtctctgcacctgctgcttctgctgcttcttctgcctggaacaatcttctggtgctgacacctcatggggtgctcctccacttgcgtcaggtctttgctcagaaggaagtcgctttggtgacatcttgcctcgtctctccacttaaaattgcacacccatccccagactccctgctcctttctgctttacttttctctatagctcatgtcactcacaatatattttacttacttatttggcttcttgtcctccctcccaactagaatgtaagctccttgaggaaggaattttgcccatttccctccctccctccctccctctccttccttccttccttcctttcctctttctccttccttcctccctccctccctcctttctttctctctccttcctccctccctccttccctccctcccttccttctttctgtgagatggagtctcgctctttcacccaggctggagtgcagtggcgtgatctcggctcactgcaacctccgcgccctgggttcaagtgattctcctgcctcagcctcctgagtagctgggattacaggtgcctgccaccatgcccggctaatttttgtatttttagtaaagacggggtttcgccatgttggccaggctggtcttcaacccctgacctcaggtgatccacccacctcagcctcccaaagtgttaggattacaggcgtgagccaccgtgcccagccccattttcattactagtcatatcccagtgcccagagcagggtctagcatacagtaggtgcttagtaagtatgtagtaaataaatgaatgaaatagcctcaaaagaggggcaagtcaggtgcagctgaaggcagaggaatgagtgattgccaaggcagggtggaaacggtgaaacttaaatgagtgattcactgaggtgagggcggaggcaggggcacgcgtggctggtagggcagatgtgaaatcacagcacgcggttagtatagtgatgttagcgtaaaggctacccaggtagagagaaagtctgagggtaaagctagaaaatatcaagatagtagtaggtcttggatgtcattataagatgtttagacctatttccctgtggcagtgatgagcccatgaaagttcctgaggccagcagtgatgtggtctctgcattgctttagaaagatccctgagggaggttgtagtgagctgagatcatgccactgcactccagcctgggtgacagagcaggactccatctcaaataaaaaaaaaaaaaatgcaagatccctgaggaagtggaggtggctgggtggggaaaggcaggaggcaaggggtctgtgggggaggatgagcaactgtcagagcagcgacttcgggagatgtttggagcagaccctgtggcactcagtggagtccagggaggcctcaaggttggattcagagtagaagctgctgtcacttactgagaaagcagatgttagaagagtgtcagtttcattggtgtacaaccagggtggttgcacagggccccgtgctcagaaggacccggaactggcaggggtgtgagaaggacccttctagattgggggggttaatgctctgtggtggccatcttgaatttcttaataattttgtctttaaatttgtgttttgtaggtgaagtctgatgggaccatggagcctcagctcataggtgatgccatctcctgccacctccctccctccctctaggggaaatagttcttggtcatcctgcatttgagtgttgtggggcccccactcaacctcagcccagtgattattgccacgctttatctctggtgggggcctggatcaggcatgggtaggttggggtggggcatcttggggtagggcaggtggcagcctttctcgatttgggctggcagcatcatggcacatttggtgatttggtgggggcaaatctcccccaccactgatctagatacctaatgcatcctggcaataccctggagggtctcccatctgctttaggctggggtggtggcccatgggaaggagacatgtctggcttgacattttacccactctggggcatggtgcctggatctggtgacttgtgggagaggcaccctgcatctggtgcaccatgtgcacatgctgagctgtggagaggcctccgagcacctttgagggtctggacaaacactgctagtgtcccagtgcccaagggaatgcattgttaaatagcaaataaaatacactgtgataggttgagagagaaactatggaagaaagaaaaagctctgtatcgtagtacctttaacagcactttcatcctgacttttgagctaggacactgcattttcattttgtattgggtcctgaaaatgatgcagttggttctgagaggaggaacagtttgtttttagttagggaggatagtctaggtaagaataggctgaatttcaggagcctctgggacacctcagaggagggtgttgggtttgggtctggagctgcagatgcagggttggcagacactgtgggagcggccatctgatatgattatgggagcggctgtgtgtgagggggaaggaggctgaaggtggggcctggttatccttctggttggactcaaataccactctccatcctctccaaaaatctctgtctttccttgctctcataagacctacttttcccctttgtttttctctggcttccttctggactttcctatccagccaggaatttaaggtcagctgcattaaacacacatcctggcaaggtgtggtgactcctgcctgtaatccccacacttttggaggccgaggtgggaggatggctcgtatccaggagtttgaggctgcattgagtcatgatcacaccactgcactccagcttaggtgacagagcgaaaccccaattccccctgtctctcttacacacagacacacagacacacacacacacacacacagacacccacacagacacagacacccacacacagacacacacggatacacacacacatacacagacatacacagagacacacactttgacacacagacacacatacagacacacacacagacacacacacacagacacacagacacacacacacatacacacacagacacagacacagacacacacacagacacacacagacacacacacacgactcagtatgtggcattgtagagcacttggattttagagtgcaccaggccctcggtaacgtctccctggacaatcactgtcttccttctctgcttccaaccctgagctgcagagtgtggcccaagaaagtccagacgcagctggcagatgtggctctgtgctcactgcctgtggctggcatctcacagctgagggcctacttcccagatggctgtctcctgccagcccactctctccctgggtggtcggttctacccacctggcttatctgatttcctgcttgttgacaagctcattttcactaggcatgttcctgcccccaggactcatctcagcataaacaaatgtgcctctcttggggctttatttatttttaaacaacttaccattacaagctgtgctgtgtggacttccctcctccaatcctacccactcccaagccccagtgaagacacttggtattggacctctgtgaggaggctgaggccatctgaccttgggcagcagtgaccccagtgggcaggtgaagggcacaggctttggggctagacagagatggattcaaatcttgcctctgtcagttacaagttgaagactatggcagatgtctttaccaagtttcagttcactcatcagtatcatggatctgccatgtctattgtaccagctggctgcaagatccaaggagatcatgtatgccatgttcttagggaagcccctggcagaaggttagtgcttaaaggatgctgctgctgtggaaaccaaaaccctcaatgtccctccacctctccgtcctcagctgcctgtgtcatcacatagtcctttctcttctgttccagaggaggccaagggtccaccctcatgtgtcttcgattccacaccctctgtctggtctctcccctgaccttgctctttccggcattccttttttgagctctccaaccccactcccgccaatttctcctttgtctgcgtaatgtgctcaattttacaggccattagtgacaaaaccccagaattcctgacaccagcttattcaatgcatttcaagataaatccaaaagtgaaataagccagacatagaaagaaaaacactacatggtctcacttgtgggtgaaatattaaaaaagcaaaatacatacaaagaaagaataaatggtggttatcaggggcgaggagggggaggaaatgaggagatgtaggtaaataaaaaaagagaaatacaatagttaggactttgcttgcgggtcttgggtagtctggcatccaagcgtgtgtaaggctgtacactcttccatatggagatgtttttattgtgggaaatattcacatttgcctgatccagattttctttctttttatggtgctacccccagtgagccagaattaatcaggccccggcttacctgatacagaggaggtaggtgttggtgctgggtcttgccctcactgagttgtgtccagctctcccactgctaactatgtgaatttggcaagtcgttaatttctctgagcctcttaggacaacttaggcactaaatacatagcatacatgaccctaaatacacatcatacatgaacctaagtacatagcatacatggtcctaagtacatagcatacatgaccctaaatacatagcatacatgaccctaagtacatagcatacatgtcctaagtacacagcatacataaccctaaatacatagcacacatgaccctaagtacatagcatacatgatctcctttgactttgcagccaccttgtgcaacagacatggtgaatccatgttattaatgagtaaactgaaacttgctaaagaaacctacccatagttttcaatctgtaaccgttagaggcaagatttgaacctgtgtgtgtctggctccagggaatgtccttccccagcccatttctttatatatggaaaatggaaatagttgtccctgctctgccatttttgcagggtgttttttggaaggcccaaggaattaacagatatggagttgtttgggtttgagatagtgaaattttatgccaatgtaaaaagagtacattgaagattggtgtcttcctactggggtgtgaagtttgaggtagaaccaggattccttagtcctgctcaaaagcatttttactggactctggtggttctccttggataggtcttaggagtgggtagagcagcctcataaggatacagaaagtcacagcacgaggctgggcttgcctccttactctgcctgctcaacttctcccactgtaactcctttttaatgaacaatctcttgattgctttcctttcttacaatctcctttctttcaatctcttatcactttcttttcttcaatttccttggaatgtaggttagattccatgatccttcattggcagtatcctgaatttcttaccctctgaccttccatcacattcctctggctaaccctgaattctgctatctttccactctccacccaaactcccacctgtgcaacagggtaggtggctgccatcttgaatcatgaccacgaccctcacatgggccacagcaatgcctgactggcagagatctcacactctactatggccatttgaagatcttgccttttccaaacatccaacacctcaaccctcacactcactcctagcaaacaactcaattcctatttctcagagaaaaatgaagccatcagatgggaacctctcagcttctcagagtgaaacctatgttcctacctctctcttccctgtcctcatctcccctcctgttacagtaaaggagacatttcctccctcttccaaggccaatctttctcctccctcctccctctgaggatagagagccatcaatgactccttctccttcttgtgtcttttatcactcctcctcactgattctcaaactgagatcttttccttcttaaatgcaagtaagcagatggacagacacacacatttactcagcccaccatcccctctgctttagtgctttcctccttttcactatcaaagtctttgaagaaagtatatttgtggtctcattttttacctccttctccctctttaatgcactccagtctgcattctcgcctcttcatgccacataaggtacttctgctgaggttattcatgactttcctatcactaatccaatggacaaatttcagtccttatcttgacctcccagcagcagtagtccctgctgacctccttgagaccctctgctctgttgggttccatgacacctctctctcctggtgtccctttcatctatgtggcccctccttctcaggcttgtttgttggctcttctttggccattaaatactggggtgggggtgttccccaggcttgacatgcaatcttatttttgcccgtgaattttagaatcagcttgtccatttctgcaaaaatggcagctgggattctgctagggattgtgttgaatctatagatcagtttggggggtattgtcattttaataatatcaagtcttccaatctatgaacatgggacatcttttcatttgtttaggtcttacataatttctttcaaccattttttgtagttctctgtatacaagttttcttttgttaaatttattgttttcctaatttaatttttggattgttcattgctagtgtatagcagcacaactaatttttgtatattgatcttgtttcctgaaaccttgctgaaatcattagttttttttttttttctttttcaacagggtctccctttgtcacccaggttggagtgcagtggcacaatctcagctcactgctacctctgcctaccaggctgaagcgattctcccacctcagcctcctgagtagctgggactgtgggcgtgtgccaccacgcccggctaatattttgtagttttggtagagacagggttttgccgtgttgccctggctggtcttgaactccggaactcaagcaatccacccacctcagcctcccaaagtgctgggattacagggcatgagccaccacacctggccctaattttaatatttgtagattccttaggattttctacatacaatgtcatgtcacctgcaaataatagtttaattactttcttttcaatctggaagctgttaatttcattttcttgcttaattactctggatggaaccttgagtacagtgttgaatagaaatggcaagaacagacatctttgtcttattcctaatcttagggggaaagcactcagtcatccaccattaagtataatgttagctgtgggtttttttactggtaacaactttatcaggttgataaagttcccttttatttctagtttgctgagtgtttccaatgtgaaaaggtgttgagggtttgtcaaatgctttttttgtgtctttgagataatcattggtttgtgttctttattctattaacatcttgcattacattgatcaattatcctaggttaaacccaatttgcattcttgggataaatcccatttggtcatggtctacaatcctttttatatgttgccagtattttgttatgtaattttgcatatatattcataaaggatgttggcctgcagatttttttttttctcttgtgatgcttttggttatcttagtctaattttggtatcagggtaatattggtctcatagaacaaattggcacgtgttctcttttctgctatttttggaagagtttgaaaatataagtgttaattcttctttaaatatttggtagaattcactagtaaagccatctgggcctgggctttgtttcatagaaagtttttaacttactaattcaatatctctatttgttataagtctattaagattttgtatttcttattaagtcagtttaggtattcgtgtctttctggaagttggctcatttcatctgggttatctaatttgttggcttacaatatttcataatattcacttataatccttttatttctgtaagttcaattgtgataccccatcttttatttctgattttagtaatctgaatcttcttacattttagttagtctagctaaaaggtgtcaaattttgttggtatttttaaagaactaacttttagtttcattggttttctgtattgttttctattctctgtttcatttatctctactctagtctttattatttctttccccctgcttgcttttggttttgtttgctttttaaaaaaatttctttactaacatgaaagacctaaggaaaacaaattcttaaggtgtaagtttaggttacttatttgagatttctctgcttcttctttttcttcttcttcaatagactttattttttagagtagttttaggttcacagtaaaattgagcaaaaagtacagcgagttcccatatactccctgtccccacatccctcatacaatctttcccactgctgacatgctgtaccacactagtatattgtggtgacatttgttacaattgataaactgacatggacacatcatcacccaaagtccatagtttacattaggggtcactcttggtggtgtacattctatggattttgattgctgtaaaataatatgtatgaacgattacagtatatagaatagtttcactgccctaaaactctactgtgctctattaattcctcccttcccccaagccctggaaaccactaatcttttttactatctccttgtttttgcctcttccagaatgtcatatagttggaagcatacagcatgtagcctttttagattggcttcttttagtaacatgcatttaaagtttctccatatctttgtgtagcttgatagcttatttctttttagcattgaataatagtccattgtctgtttgtaccacaatttatgagtccattcactttctgaagggcagcttgcttccaagttttggcaatgatgaacaaagctgccataaacattcatgtgcaggtttttgtgtggacagaggtattcaactcattttggtaaatatcaaggaatgcgattgctggatcctatggtaaaagtatattttgttttgtagaaaactgctagactgtattccaaaggggctgtctcattttgcattcccaccaacaatgaatgagagttcctgtttttccacatcctcgtcagcatttggtgttgtcagtgttttggattttggccattctgataagtatgtagtggtatcttttctttttttcattaattaaaaaaattttgagtaatttttttagagataaggtctgtctctgttgcccagcttgaagtgcaatggcataatcacagctcactgcagtgttgaactcctgggctcaagtgagactcctgtctcagcctcctaagtagttatgacaacaggcacacatcatcattctcaactaattttttattttatgtttttgtagagacagagtctctctatgttgcccaggctggtctcaaactcctggcctaaggcaattgtcctgccttggccttccaaagatttgggattacaggcatgggccatcatgtctggctctatctttcctttttttttttttttttttttttttttttttaaatagaagtatttataactataaacttccctttaagcactgcattagctgcatccaatacattttggcatgttgtgattttgttttcatccctctcaaagtgttttctaatttcctttgtgatttcttctttgacccttggttatttaggagtgtgtttttaaatttcagtgtatttatgaactcctcaactttccttctattgttgatttctaatttcattttatcatggtcagagaatatactttgtatgatttcagtccttgcagatttgttgagatttgttttatggggcgatcttatctttggatagagctttatttgaaacctatttggcaggtccagttggataccttgaaaggatcttgaaaccagcaagcacgagatcacactcatgacattccaccccccaatcacttttcttttagtattccccatcttgatgaagatgccactatcccatgagttgctttggtcagaaacctaaaatcatccttgatatcttcctcttcctttttttcctaaattcaatccattactgagcccagttgattttacttttatagctctcttacatctagccactttgttccatatccattgccaataccatagtccaagctatgactatctgtgacatttaaaagtactataattttccttagtccaaactattaccatctttgcagggactactgcaattttcttactaattggtttcccagcctctacttttgcactcttccaatccatttttcatgttgcagccagtttctattttgaaaatgtactgatcttgtcaaccttctgcttaaaattccacaccatcaggaaaagacccaaatccaacatggtgcacaagcctggcatagtctacttcctgttggtatctgtagccttatctcaaccctttgctatctgccctccagccacactggcctgctttcagtttcttgactgcctcctcctgccttctccacagagcctttgtacatgctattctcttttcctggaactttttccttcctgctttgcttagttaaatcctctgtattcttcagacctccctcaaacctcacttcatgaaggaattttttttttttatgagcaaaaaatcctatctgtgtttgtttactaaagtcatcccggccagagaaggcctcaacgaatatttgataaatacaaagacaaatccctcagcccagactcagcttctgccttggatctcttccccatccctgcttcagaacagaacccaggccagactcaccgcagggtctccaggaggcagcgagggcgtctcagggtcttacaaagactcttcactgcagagtggctcagcgagtttccacttaggtccagctccttcaggtttctggtgaccttgaggacggagaagagaatctgccaataggcatctgtgactgggacccacctgaacctgagggggagagagaaggacaggagagatgtgatgtgtctggcaggggtttgaggtgcccagccctgcacaacacagttgggctttgtccccctgagcaccaggccacagcgggtagtgccatctccagtactgaccagccctccctgcctgtctgcccgtcacccagggctaggtccctctcctccatgtggctcctcattctacagcccttaccatagcacactgaagtgttcaccttgtgtgtctgtttctgcctcagtctgggagttccttgagggcagggacagacatttgtctttttttttttttttttaaatctgcactgctcagcatagggcctggcctcggtgctgagcactgcagataagaaaaaaattttttaaaaaaatttgacaattttaatttaaaaaaaatttgacagccttcctccctttgatgcagacacacctgtgttcctttggcacagacattctggagtcccagtgcccaggaaagaagacgggaggcagtagcagagcctgggagagatggcctgaggatgttgtgatggaagactgtatatgatcatatgcactgctgtccaggttggctcacatgggaccctatccccttcccaggataacaagagggtctgcaggagagggatggctgtggggagtgccctaggagagaatatttgcagcctgaggggaagagatgacgggctttgtctgagggtgttagagtagactccgactcatggaatttccacccatttaatctgttttcacacactactttagtgacctcatctacctccaaggcttcaactactcaaatctctattccaagtttcagactgagttttctattttctggttggatatccccaccttgacatcccagtaattctttgatctaatttgtcccaacaagtccccaacctgaattcatcttttcccctaagtctgcagagccatgtgggggcaagaagcagaggcaaggagctgcctgcatgtgggctctgcttctctatccctcactccgtctcctccgctgcaaaaagaggacagcaatagcacctgctgcagaggggtatgtgagaattaaaagctactaaagagtatcccaaaagtcctagagcagttttaagttttaataactgtgaaagtacaagtactacaaacatataaaaaaagccagctgagtgcagtggctctagcctgtaatcccagtacttgaggaggtagaggcaggaggatcgattgagcccaggagtttaagaccagcctgggcaacatagtaagatcctgtttctacaaaaaataaaaaaaattaggcaatgtggtggtgtgcacctgtagtcccagctactcaggaggctgaggcaggagaatggcttgaacctgggaggccaaggttgcagtgaggtatggtcatgccactgcactattcctgggagacacagtgagatcccatcacacacacacacacacacacacacacacacacacacacgaaaaaaagccataaatgaaagcttacttgaatttcttttacacttacttagttttgtgaaacttgaaaaatacattttaaattttttatttccgttggcatttgccatccttaatcaaggtgactgaaaaaaaattaaaaatttatacttgaaaatgcacaatgcttaatcacatgccaaacacctggaagctcccatcctgtcatcttcatttctttaatatctctggttggttctcctcttccttcacacagcccttggccaacctccaccctttcttcctgaactttcttgttttttttatagtagcttccttattcttctctctgccttgtctagctgattcagttccttgaaaatttctcctcccacttgtggctgaagcctctgactttcccacggcattctcttaaggctccacttgctcccgcccatcccaaactctcctctctggcctggtgttcttggttccctttgcctatcccagcccccatcccccggccagccaccatctggtctctgcctctagctgcttggaactctttgaagatttcccacctgtccactgctacttgcagtacctgtatccaggtcctttaaagcctacctcacatttataactatgaacaactagaagcagcttaaaatggccaagaacaggagaatggtcaaatcagccatggcactttccctatggaatagcatgtggtcattcaaaatggtgttgtatcagactacttaaaaatatataaagggctggcatggtggctcatgcctgtgatcccagcactttgggaggctgaggcagaaggatcatttgaggtcaggagttcaagaccaacctggccaacatggtgaaaccccgtttctactaagacgacaaaaaattagctgggtgtggtggtgcgtgcctgtaatcccagctactctggaggctgaggcatgagaattgcttgaacctgggaggcagaggttgcagtgagcagagatcgtgccaccgcatgccagcctggtgacagagcaagactctgtctgtctctgtctctgtctctctctctacacacacacacacacacacacacacacacacacacacacacacacatgaagggctgggcatggtggctcacatctgtgatcccagcactttgggaggtcaaggtgagcagcttgcttgagcccaggagtttgagaccagcttggtcaacacagtgaaatctcatctctatacaaaaaatatacaaaaattatcgctgcatgttggcatgctcctgtagtctcagctcctagcggggctgaggtaagaggatcccttaaactcgggtggtccaggctgcagtgagctgtgattgcaccactgcactccagcctaggggacagagcgagactccgtctcagacaacaacaaaccaaaaaaaaaaaaaaataccccacacccactcacaagaagatagccttgatatataaagaaaataaaactgactataaaataaaatgtacaatatggttcgatttcgccatagacatgtgcacagaaaaaagactggggttcttacaattgaccactaattttttttttttttgagactgagttttgctctttttcccaggctggagtgaagtggcacaatctcagctcactgcaacctctgcccctgacctgtcaagtgattctcctgcctcagcctcctgagtagctgggattacaggcgcctgacaccattttcggctaatttatgtatttttagtagagatggggtttc[132 bp omitted]tggaattcttattgatactatttttcatctttttgcttatctacgttatcttttgtttgtttgttttttgagacggagtctggctctgttgcccaggttggagttcagtatcacgatctcagctcattgcaaactccgtctcccagattcaagtgattctcatgcctcagtctccctaatagctgggattacaggcgtgtgccaccatgcccagataatttttgtattttttggtagagatggggttttgccatgttggccaggctggtctcgaactcctggcctcaagtgatcctcctgcttcagcctcccaaagtactggaattacaggtgtgagctacttcacccagcctacatatctttttttttttcctataatgaacatgaattttattgtgagaaaaagttttaaaaatataaatatgaaggcccacatcaaacatttcttcctctgagaatctttattacccactcgtgtgatcactcccttccttgggccaccacagtaccttgtccatacctctactgttgtagacatcacactctgttgtcattaaatgaatgtttgtcttctcccctattttttgagctccttaaggcacgtattgtgctttttaatctgtgatctgtagggcctggcatagaatcagtgcttaataaatacttatggaatgaatcatctaaagcaggacatagacacataccaatagcatgtgatcgataccacgacagaggtcggggaaccgggatggggaagttctcagtactgccgggctggagaatggttggaggaagctattcttgcacagccagagagtgggtttcaggttgagtgcgtggggcaatggtggcaccacggtcacaaataattatgaagtcagttttgcagggaaaaataggaaactctttttgagagctgatggggaagatctcagggccaatgtcgttgtcatggaaagggttcctgaagcagctggaggagcaatttctccgagagaatgaatgcccagagagaggagcaggggtaggggggctgcctgatccttggggagtgtgggggtagctaaggtcagcaggaaggtgggagcacgtccaggagagaagatggacggtcattctaagggtaggaggagaggtggcagacacggcagggcccagtggcctctccagaagcaagcagggcctgccccacagccgggcactgcagaggagcttaggtagacagagcatggtggtcagattgggcagttagaagtcactggagaccctgatcctttagccacccccacccccggccaggctcagtgagcatgcctctggtgctcaggtcactcgggcttatggactgacagaggagctgcagacatgggtggtttgggtactcacaggactaccatggtggggctccatgttgatctgtgctgcctgccctcaatcagctgaagcttcttcacgtggcggctgaatttaatgcagaaagtgcacactaagagctccatgtctgtttctacacacatgcccatttcttcgaaatgggccatcacttgtgtcaggaacgttttgttccgagtctcgtacaagcagtggagggactccagagagtgtggctgcagcagcagctgcagggacgggacccactgcatcaggttcctcccctgagacagccggcagtgaaagatgttctccatctctctctccccctcatcacttaacaggcccaataggaaacgtgtggttgatgccccaaacaggccatgtattccatatgcttctagcgtcttttccaaatctatgatgcaattagaatgtttacctctccccttctcatcctccaagacataggacattgctgcaaagaactcttggaaacagaggtgaatgaagctgtagctcagagggatggggtgctcttgaagaatacccatcttcaagaaggtggagatgatggccccatctaacccatgcttcctgaggtcatctggactgaaaagggtctttttttgccagatgccctcagcagccagagagcagaggtctctgagctggggtcccaatggctgagcttggagagcctgggcaaggtaatgtagacagagggttgtggtggtcttggaagtcagtgtgagtttttccttccgcttcatctgctgcatcaggcaagtgcaggccagccaggacacccagggcacaagacacagggcccagagctctttgtttgatttgaccaacctaaaggctctaattgcttgcctttcatctgtgaaatatctgtagaaatattccttcctgctggactcagagaaccccaggacctctacccaacgtgcctgctccaaagaaggaatgaggttctgcagagctgtggtccgagccgtgatcaggaaggatgcctcgggaagtatagttttccccagcaaactgcccagcagtgcatccgccggctgtggctggctccagtgcagacagagctcagaactcggctcctgcaagacccatcctggctcatctacaccatcgaggatgaagagcagccgctctggcctagacaggatctgtctaatgggagccggagtggctgtcccatcttttccgatgagctcagcgagactcaccaccttggactgggccagctctctgcagctgaagtagaagacatgctggaagcggtccccatacagctggcctctcccccaggcttccttcacctgcctggccagtgttgacttcccaattccagcagccccctgcagtatgactatgcgaggttcttgggtatccaggcctgggccaaataagtctctgatctcaattaaatgtcctcgattctcctccacataatcaggccagcttctcttgaccaggggatcttggcttctggggtgaggtctttgtagaagtagcagctgtgtgaatttttggttaaaatcctcatttttccagggccatgtggaacagaggctctctctcacagaaggctcccatgggtggtggtggggctgtaggctggtgtgcgcctgtgggggcgttcctaccaccgctgcccatgggggcctgcctttctctgatttctctctctctctttctctgatttctaagtaagggagggaaagaaggaacataaaggtagagaatagaagaattaattaattaattaaacaactgttttaggcacctactccaagccacacactgcgctgtctgcagacactggtatgttcttgccatgcggcggaaggacatgtgctttggggtagaatatcccagttcaagtcttgactcaactaagtcacactccctgaatgactttccttcactgaatatttatcaagggcttactctgtgccaggtgctgctataggggttggggataaagagtgaacaaaacagacacaactctcagtcctcactaagcttatgatgctggccattagcccctatgagcctcagttttctcatctgtaagctgggggttgtaggtcatggaggactggaggagacactggagtgtgtagcagatgctgacagcatcccaagcacctgctattgcagtacctgccaatggtgtccctcggcaacagctgtggtcatctgtctgagggctctttctctgcctgtaagccgggtgggccagaaatactggaggatagttctccagtccaggaggtgcccttagtggatgacaggtggggtcccttgcccccaggacagataacactcaggcatgttctcaccgtctcccagacaaccgcagcagcatggagcctcagttgctcacaaggtaacctgttccataatctacctttcctgggtttccccgcctcaccattctctcttgttgatgagtccaagaaatcacctccccagtaagccacctgcaaccaaatccggtctcaggcttccgggcgagcccgacctgagactgatggaagatacctcatgacctgtgagaagctgaggttatatacaccattgtttcccagggagggacctcaggctcctatcttagtcagattccaaatagaacaacagttacaacctcttctgttcttttcttcacaatatgttcagtgcctctcccttctctccttaggtgaatttcattttattttatttatttttttgaggcagagtttctctcttgtcacccaggctggagtgcagtggcacgatctcggctcaccgcaacctccgcctcccagggtcaagcgattctcctgcctcagcccccagagtagctgggattataagtacccgccatcacgccagctaatttttgtatttttgtagagatggggtttcaccatgttggccatgctggtctcaaactcctgacctcacgtgatctgcccgcctcagcctcccaaagtgctgggattacaggcatgggccactgcacccagcctactatcttgtcttttactcaaacaagttttcctacctttgctcttgatagatcaaaaagcatgccatgtggttttttttttttttttttttttttttttgagacggagtctcgctctgtcgcccaggccggactgcggactgcagtggcgcaatctcagctcactgcaagctccgcttcccgggttcacgccattctcctgcctc[224 bp omitted]attattttgttcaggttccccacttggacagcagagggggtgactctgcccatccctgccactggtagccaggcgggcaatgtctgctagcagtctgcttctgtctgaactcagccagcagaggcaaactcccggttccccgagaaacactctgaaggcagggtgggtgactccacccaccaccgcctctcctagccatgcaggccatgtctgctagagcttccagcgcagtggtcctaattctgtctgaatccggctgaggggtgcagcctcctgttactgcccagggaaacacccagatggcagggtgggtgactccaaccacctctgcctgtggtagccagatgggccacacctgctagagcttccagcccagcagtcccgctactctgtgggtgggtgccatcccctgttcctctgggaagcacccagacagctgattacgtgaccccacccacttctgcagatcctagctgagcaggacttgctggtttggacaatgcccaagcagggaagagccctcattctcttatcactgacagaggtgagatgtccgagtttgtaggctggtggaggagtgaggtggaggaggtatgcctctctctgcagggcggacccagcaaggatacggcctgtctgccaaccacggcccctgcctgaaggaaccccgtttaccagaacacccaacaaaagaaatgcaggtgtggagccagtaatcagaagggtcttgtctaaggcccaggagtggactaagtgagaaggtcacccccctgtccccaacacacacagaacactactgccaactgtactgaaacatgaagaaccacgcagcagagtaagagtgtatctcctggtgatcactcttaagcactgcctactggatggcggccccaaaatacaacaccaaaatgttttgcagtattcagtgccatgaaaactaaggcaaaggctcccaccagtgccctgccccagccaacacacacgcaccctgccatgccactgtggctggtgccatgtgtgagtgagcacagatcctgctggcactgccacaaggaagcactttggcctgcacccccactggactgttgaggccagcggactgggaacaccttggcccctctaatgcagcaggttctgaaccccaggaggccagaggaaaaggctggggacccagtaccagccttctagagttagagcaggcagctcaggagtgctgagctgagccttggccacctgaaatcttccagaatcgaagccagttgactgaacccaccttatacgacaatcaaacccccaagggcttcaaacaagataaaaacaaaacaaaaaaaaccccatccaaaggaagacaacttcaaagattaaaggaacatcagcccacacacacgagaaagaaccagctcaagagctctggtaactcaaaaagccacagtgtcttcctatctccagatgtgtgcactagtgcctcagcaatggtattttaacaggctgaaatggctgaaatgacagacatagaattcagaatatgagtaggaatgaagatcattgagattcaggagaaagtcaaaatccagtccaagcaatctaaggaatatgataaaatgatacaggagctgaaagacgaaatggtcattttaggaaagaaccaaactgatctgatagagctggaaatctcactacaagaatttcataatacaatagcaagtattaacaacaggatagaccaagctgaggaaagaatctcagagcctgaagactggttctccaaattaactcagtcagacaaaaataaaaaagaatgaaaacaaatgaacaacacctctgaggaatatgggattttggaaagagaccaaatctatgactcgctggcatccctgaaagagcatgagaaagccagcaacttggaaaacgtatttgaagatattgtccacaaaagtttccccaacctccctagagaagccaacatttaaattcaggaaatgcaaagaatccttgtgagatactatacaagacaatcatccctaaaacacatagttctcagattccccaagtcctcagattctccaaggccaacatgaaagaaaaaacaataaaggcagctagacacagaaggggcaggtcacctaaaaagggaacctcatcaggctaacagtgaacttttcagcagaagccctgcaaggcagaagagattgggggcctatattcagcatccttaaagaaaagaaattccagccaataatttcttttcttttttaaaattttaaaattattttttaaaaattttgtggatatgtagtaggtgtatgtatttatggggatccatgagatggtttgatacaagtaagcactgtaaaataagcacatcatggagaatggggtatgcagctcctcaaacatttaacctttgagttacaaacaatccaactatattctttgttattaaaaagtatacaattaatttattattgactatagtcaccctattgtgctatcaaacagtgggtcttattcattctttctatttttttgtacccactaactatccccacctttccctcttgccccccactacttttctcagcttctggtaaccatccttctgctctctatgtccatgagttcaattgatttgagttttagatcccacaaataagtgagaacatgtgatgtttgtcttcctgtgcctggcttatttcacataacgtaatctccagtttcatccatgtttgttgcaaatgactgggactcattctctttgatggctgaatagtatgtatatgcaccacgttttctatatctgttcatctgctgatggacacttgggttgcttccaatcttggctattataaacagtgctgccacaaacatagaagtgcatgtatctcttcgatattctgatttcctttcttttggatgtataccctgcagtgagattgctcaatttttagtgttttttttttttttttttttttagacagagtcttgctctgttgcccaggctggagtgcagtggcgcaatcttggctcactgcaagctccgcctcctgggttcacaccattctgctgcctcagcctcccgagtagctgggactacaggtgcccgccactgcacctggctaattttttgtgtttttagtagagatggggttt[132 bp omitted]tgttctccatagtggttgtactaatttacgttcccaccaacagtgtatgagagtttccttttctccacaccctcacaagaatttgttcttgcctgtcttttggataaaagccattttagctggggtgaggtgatattgcagttttcatttgcatttctctgactatcagtgatgttgaatgccttttcatatgcctgtttgccatttgtatatcttcttctgagaaacgtctattctaatcttttaactattttttgatcgaattttagattttttcctatagagtcatttgagctccttatatattctggttattaatcccttgtctgaagggtagtttgcaaatactttctcccattctgtgggttgtctcttcactttgtttattgtatccctcactgtgcagaagctttttaacttgacatgatcttgtttgtccatgtttgctttggttgcctatgcttgtgtgttattgctcaagaaatctttgcagaccaatgtcctggagattttccccaatgttttcttgtagtagcttcatagtttgaggtcttagatttaagtttttagtcaattttttgatgtgtttttgtctggttttggtattaaggtaatactggcctcagagaatgagtgtggtaatagtccttcctcctctattttttcggagtagtttcagtaggactgatactagttcttcttaaatgttgggtagaatttcagcagtgaagccatccagtccttggcttttcttcactgtaaggctttttattacggcttccatgttgttacttgttattggtctgtttaggttttggatttcttcctagttcagtcttggtaggctgtatgtatctagagatttgtccatttcttctagattttccaatttattggcatataattgctcatagcagccactaatgatcccttgaatttctgcagtatcagctgaaatgtttcctttttcatttctgattttatttatttagatcttctctctttttttcttagcttggctaaaggtttgtcgattttaacttttcaaaaaatcaactttttgtttcattgatcttttgtattttttctttttaatttcatttatttctgctctgatctttgttatttcttttcatctactaatagtgggtttggtttgttcctgcttttctctctttaagatgcatcattagattgtttatttgaagtttttcctcttttttgatataggcacttatagctataaacttctctcttaatatatcccataggttttggtatattgtgtttccatgatcatttgtttcaagaaatttttctttctttattttgttcttaatttcttcattgacccactggtcactcaggagcatattgtttaattttcatgtatttatgtagttttctaaattcctcttattattaatttctaattttattgcattgtggtcagagaagatgcttgatattatttcaattttttgaatgttttaagacttgttttgtgagctaatatatggtgtatccttgggaatgatccatgtgctgaggaaaagaatgtgtattctgcagctcttggatggaatgttctgtaaatatctattagatccatttggtctgtaatgcagattaagtttcatgtttctttgctgattttctgtctggaagatacgtccaatgctaaaagtggggtgttaaagtctccagctattattgtattgaggcctatctctctctttagctctaataatatttcctttacatatctgggtgttcctgtgttgggtgcatatatatttaaaattgttatatcctcttgctgaattgactccattatcattatatagtgaccttctttgtctctctttgtatagtttttgttttgaaatctattttgtctgatacaagtatagtgacttctgctcttttttgttttccactggcatgtaatatatttttccatcacttcattttctgtttatgtgtgtctttataggtgaaatgtgtttcttgtagggaacagatcattggttcttgttttttcattcattcagccagtctatgtcttttgattggatagtttaatccatttacattacttattattgataagtaaggacttactcttgccattttattatttgttttctgcttgttttgtgatcttctcttctttcttttattcctgtcttcctctagtgaagatgattttctctggtgatataatttggtttcttgatttttattttttgtgtatccattttatgttttttggtttgaggttaccatgaggcttgcaaataccatcttataatctattattttaatctgataacaacactatttggataaacaaataaacaaacaggcagaaagaaaactaataaaaacttaacttcatttcccagctttttaaactttttgttgtttctatttatatattattttactgactgtgtcttgaaaagttgttgtagttattatttttgattggttcatcatctagtctgtctacttagggtaagagaggttatacaccacagttacagtgtaaaaatattctgtgtttttcggtgtacttactattatgagtaagtttcttaccttcaggtgatgattgctcattaatgttcttctctttctgattgaagtactccttttagcatttcttgtaggatgggtttggtattgatgaaatccttcagcttttgtttgggaaaatctttatttctccttcatgtttgaaagatattttcaccagatatactatttagggtaaaagttttctttccttcagaactttaaatatgtcatgccactctctcctggcctgtaaggtttccatgaaaagtctgcggccagatgtattggaactccatagtatgttacttgtttcttttctcttgctgcttttaaaatcctttctttatccttgacctttgggagtttgattattaaatgccttgaggtagtctactttgggttaaatctactcggtgttctaaaaccttcttgtacttggatatctttccctaggtttgggaaattttctcttatccctttgaataaaacttctactcctatttctttcactacctcctccttaaggccaataactcttagatttgccattttgaggctattttctagatcctgcaggtgtgtttcattgttttttttattcttttttcttttgtcccttctgtgtattttcaattatagcctgtcttcaagctcactaattctttcttctgctggatccattctgctatgaaaggactctgatgcattcttcagtatgcaaattgaattttttcagctccagaatttctgtttgattatttttaattatttcaatctctttattacatttatctgctagaattctgaattccttctctgtgttatcttgagtttctttgaatttcctcaacacagctattttgaattctgtctgaaaggtcacatatctctctttctccagaattggtccctgatgccttatggtgaggtcatgttttcctggatggtgttaatgctagtagatgttcttcagtgtctgggcattgaagagttgagcatttattgtagtcttcactgtccaggcttatttataggcagcctttttggaaaggctttccagatttgaaaggacttgagttttgtgatctaaggcatttctgctttagagggcaccctaagcccagtaatgctgtggttcttgcacagtcatagaggtaccaccttaatagtcttagacaaaatctggttgaattatctaggttaccaggcagagactcttgttctctttccttactttctgccaaacatacagtctctgtctcttctaagccacctaaagccacctttaacctcattagaaagtgacacaagcacccccgtggccacctaccactatgactgtgctccaaccaagaatttcatatacagccaaactaagccttataagcgaaggagaaataagatccttttcagacaagcaaatgctaagggaatttattaccaccagacctgccttacaagaggttcttaagggagtgctaaatatggaaacaaaagaccatcactggccaccataaaacacactaaagtacacagtccactgatactatcaagcaactacaaaatcaagtctgcaaaataatcagctaacaacatgatgacaggattaaactcacacatatcgatattaatccaaatgtaaatgggctaaatgctcccattaaaaggcacagagtggcaagttcaataaagaagcatggcccaactggatactgtcttcaagagatccatctcacatgcaatgacattcataggctcaaagtaaagggatggggaaaaatctaccaagcaaatggaaaacaaacaaaagcacggattgccattctaatttcacacaaaacagacttcaaatcaacatcaatcaaaaaagacaaagaaaggcatcacataataataaagggttcaattcaacaagaagacttaactgtcaggaatatatatgcatccaatacaggagcacccagattcataagacgagttcttagagactgatgaagagacttagataaccatatagtaataatgggagacttcacccactgacagtattgaacagatcatcaaggcagaatactaacaaagatatttgggacctaaattcgacacttgaccaaatgggcctaagagacatctacagaactctccaccccaaacaacagaatatatattcttctcatttgcacatggcatatactgtaaaatcaaccacacaatctgccataaaaagttctcagcaaattttaaaaaacccaaatcataccagccacactcttggaccactgcacaattaaaaaaaatcaatactaagaagatagctcagaaccatacaattcatggaaattaaacaacctgctcctgagtggcttttgggtaaacaatgaaattaaggcagaaataaagaaattctttgaaaccaattagaacaaagatacaatatgccaattctctgggacacagataaagcagtggaaagtttatagcagtaaatgcccatatcaaaaagttagaaaaatctcaaattagcaacctaacatcacaaatagaagaattagaaaaacaagagcaagatcaatcccaaagctagcagaagacaagaaataaccaaaatcagagctgaactgaataaaattgagatggaaaaaaccatacaaaagatcaacaaaaccaaaagttcattctttggaagaataaataagatcgatagaccactagctagactaataaagaaaaaaaaaagacagaagatccaaataaacacaaccagaaatgacaaagaggacattaccattgaccccgtggaaatataaaaaaccctcagagactattacgaacacctctatatacagaaactagaaaaacctacaagaaataaattcctaggactgaaccaggaagaaattaaaactctgaacagagcaataacgagttctaaaattgaatcagtaataaaaattctaacaaccagaaaaaggccaggaccagagagattcacagctgaattctaccagacacataaagaagagctcgtacaatttctactgaaactattccaaaaaattgaggaggaggggactcctctctaactcattctatgagttaggtatcattctatgagtttggtatcattctgataccgaaacctggcagagacacaacaaaagaagaaaacttaaggacaatatctgtgatgaacatagctgcaaaaatcttcagcaaaatactagcaaactgaatccagcagcacgtcaaaaagcgaattcaccacaaccagataggttttatctctgggatgcatgtttgattcaacatatgcaaatcaataaatgtgatctatcacataaatagaagtaaaaaagcccccacatgatcatctcaatagatgcagaaaaagcatttgataaaattcaacatccttcaatgttaaaactctcaacaaactagacattgaaggagcatacctcaaaataataagggccatttatgacaaaaccacagccaacatcacactgaatgggcaaaagctggaagtattctccttgagaaccagaacaagacaaggatgctcattctcaccatctattcaacatagtactagaagtcctacccagagcaatcaggtaagagaaagaagtaaaagacatccaaataggaggagaggaagtcaaagtatctctgtttgcagatgttatgattttatacctagaaaacctcctagtctctgtcccaaatctgctagatctaataaacaacttcagcaaagtttcaggatacaaaatcaatttcttctattgggtagtaagtattatgtaacattgtgcaataagcaccaaatcaagaatgcaatcccattcacaatagccacaaaaaagtacctaggaatacatctaaccaggattgtgaaagatctctatagcaagaactacaaaacactgctgaaagaaatcagagatgatacacacacaaatggaaaacattccatgctcatgaataggaataatcaatattgttaaaatcgccatactactccaagcaatttacagattcaatgctattcctagcaagcaaccaatgacattcttcacataatgagaaagaaattctaaaattaatatggaaccaaaaaacagcccaaatagccaaagcaattctaagtaaaaaataacaaatctggaggcatcacattacctatttttaaactatactacaaggcaacagtaaccaaaacggcatgctactggtacaaaaacagacacatagaccaatggaacagaataaaatgcccagaaataaagctgtatatctacaaccatctgatctttgataatgttgacaaaaacaagcaatggggaaagcattccctattcaatacgtgatgctgagataactggctagccatatgcagaagactgaaactggaccccttcctgatactatatacaaagatcaatggaagatggatgaaagtcttaaacgtaaaacctagaactttaaaaacccttgaagaaaacttaggaaatactattctgaacataggtcctggcaaaaatttcatgaggaagatgccaaaaacaattgcaatgaaaacaaaaattgacaaatgggacctaattaaactagagaacttctgcacagcaaaagaaactacccacaaagtaaatagacaacccacagaatgggagaaaatatttgcaaactacccatctgacaaagttggaatatccagaatctataaggaacttaaacacattaataagccaaaaacaatcccattaaaaagtggacaaatggccaggcatggtggctcatgcctgtaatcctaccactttggggactgaggtggacagatcacttgaggtgaggaattcgagaccagcctggccaacagaccatctctactaaaaaatacaaaaattagctgggcgtagtggtgcacacctgtaatcccagctacttgggagggtgaggcaggagaatcccttgagcccgtgaggtggaggttgcaatgagcagagatctcaccactgcattccagcttggatgacagtgtgatactttgtctcagaaaaaaaaaaaaaaaaaagtggacaaaggacaccaatagactcttcaaaagaagacatacacatggccaacagcatatgaaaaaatgctcaacatcacttattattagcaaaatgcaaattggggtggttccaagatggccgaataggaacagctccggtctacaactcccagggtgagcagcgcagaagacaggtgatttctgtatttccaactgaggtaccaggttcatctcactggggcttgtcagacagtgggtgcaggacagtgggtgcagcccaccgagcataagccaaagcagggcgaggcattgcctcacctgggaagtgcaaggggtcagggaattccctttcctagccaagggaagctgtgacagatggcacctggaaaattgggtcactcccaccctaatactgcacttttccaacggtctttgcaaacggcacaccaggagattatatcccgtgcctggctcagagggtcctgtacccacggagcctcacttattgctagccagcagtctgagattgaacagcaaggcggcagtgaggcggggggaggggtgcccaccattgctgaggcttgagtaggtaaacaaagcagctgggaagcttgaactgggtggagcccaccgcagctcaaggaggcctgcctgcctctgtagactccacctctgggggcagggcatagccaaacaaaaggcagcagaaacctctgcagacttaaatgtccctgtttgacagctttgaagagagcagcggttctcccagcatggagtttgagatctgagaacagacagactgcctcctcaggtgggtccctgacccccgagtagcctaactgggaagcacccccaagtaggggcagactgacacctcacacagccgtctacctctctgagacgaagcttccagaggaaggatcaggcagcaacatttgctgtttagcaatattcgctgttcttcagcctctgctgctgatacccaggcaaacaaggtctggagtggacctccagcaaactccaacagacctgcagctgagggtcctgactgttagaaggaaaactaacaaacataaaggacatccacaccaaaaccccatctttatgtcaaagaccaaaggtagataaaaccacaaagatggggaaaaaactgaccagaaaagctgaaaattctaaaaatcagagcgcctctccccctccaaaggaacatagctcctcgccagcaatggaacaaagctggacggagaatgactttgatgagttgagagaagaaggcttcagaagatcaaacttctccgagctaaaggaggaagttcgaatccatcacaaagaagctaaaaaccttgaaaaaagattagacaaatggctaactaaaataaccagtgtagagaagtccttaaatgacctgatggagctgaaaaccatggcacgagaactacgtgaagaatgcacaagcttcagtagccaattcgatcaactggaagaaagggtatcagtgattgaagaccaaatgaatgaaatgaaggaagaagagaagtttagagaaaaaagagtaaaaagaaacgaacaaagcctccaagaaatatgggactatgtgaaaagaccaaatctacatctgattggtgtacctgaaagtgacggggagaatggaaccaagttggaaatcattctgcaggatattatccaggagaacttccccaacctagcaaggcaggccaacattcaaattcaggagctacagagaacaccacaaagatactccttaagaagagcaactccaagacacataattgtcagattcaccaaagctgaaatgaaggaaaaaatgttaagggcagccagagagaaaggtcgggttacccacaaagggaagcccatcagactaacagtggatctctcggcagaaactctacaagccagaagagagtgggggccaatattcaacattctttttttttttttttttttgagatggagtctcgctctgtcacccaggctggagtgcagtggcataacctcggctcactgcaagctccgcctcccaggttcatgccattctcctgccttagcctcctgagcagctgggactataggtgcccgccatcacgcccggctaattttttttgtattttttagtagagatggggtttcaccatgttagccaggacggtctcgatctcctgacctcatggtctgcccatctcggcctcccaaaatgctgggattacaggtgtgagccaccacgcctggcaatattcaactttcttaaagaaaagaattttcaacccagaatttcatatccagccaaactaagcttcataagtgaaggagaaataaaatcctttacagacaagcaaatgctgagagattttgtcaccaccaggcctgccctaaaagagttcctgaaggaagcactaaacatggaaaggaacaaccggtatcagccactgcaaaaacatgccaaactgtaaagaccaccaatgctaggaagaaactgcatcaactcatgagcaaaataaccagctaacatcataatgacaggatcaaattcacacataacaatattaaccttaaatgtaaatgggctaaatgctccgattaaaagacacagacagggaaatgggataaagagtcaagacccatcagtgtgctgtattcaggaaacccatctcacgtgcaaagacacacataggctcaaaataaagggatggaggaagatctaccaagcaaatggaaaacaaaaaaaggcaggggttgcaatcctagtctctgataaaacagactttaaaccaacaaagactaaaagagacaaagaaggccattacataatggtaaagggatcaattcaacaagaagagctaactatcctaaatatatatgcacccaatacaggatcacccagattcataaagcaagaccttagagacctacaaagagacttaagactcccacacaataataatgggagactttaacacccccctgtcaacattagacagatcaacgagacagaaagttaaaaaggatatccaggaattgaactcagctctgcaccaagggacctaatagacatctacagaactctccaccccaaatcaacagaatatatattcttctcagcacacattgcgcttattccaaaattgaccacatagttggaagtaaagcactcctcagcaaatgtaaaaggacagaaattataacaaactgtctctcagaccattcagtgcaatcaaactagaactcaggattaagaaactcactcaaaaccgctcaactacatggaaactgaacaacctgctcctgaatgactactgggtacataacgaaatgaaggcagaaataaagatgttctttgaaaccaatgagaacaaagacacaacataccagaatctctgggacacatttaaagctgtgtgtagagggaaatttatagcactaaatgcccacaagagaaagcaggaaagatctaaaattgacaccctaacatcacaatagaaagaactagaaaagcaagagcaaacacattcaaaagctagcagaaggcaagaaataactaagatcagagcagaactgaaggagacagagacacaaaaaacctttcaaaaaatcaatgaatccaggagctggttttttgaaaagatcaacaaaattgatagaccgctagcaagacgaataaagaagaaaagagagaagaatcaaatagatgcaataagaaatgataaaggggatatcaccaccgatcctacagaaatacaaactaccatcagagaatactataaacacctctacacaaataaactagaaaatctagaagaaatggacacattcctggacacatacacccttccaagactaaaccaggaagaagttgaatccctgaatagaccaataacaggctctgaaattgaggcaataattaatagcctaccaatccagacggattcacagccaaattctaccagacgtacaaggaggagctggtaccattccttctgaaactattccaatcaatagaaaaagaaggaatcctccctaactcattttacgaggcaagcatcatcctgataccaaagcctggcagagacacaacaaaaaaaaaggaattttagaccaatatccctgatgaacattgatgcaaaaatcctcaataaaatactggcaaaccgaatccagcagcacatcaaaaagcttatccagcatgatcaagtgggcttcatccctgggatgctaaggctggttcaacatacgcaaatcaataaatgcaatccagcatataaacacaaccaaagacaaaaaccacatgattatctcaatagatgcagaaaaggcctttgaaaaaattcaacagccctacatgctaaaaaccctcaataaattaggtattgatgggatgtatctcaaaataataagagctatttatggcaaaccgacagccaatatcatactgaatgggcaaaaactgcaagcattccctttgaaaactggcacaagacagggatgccctctctcatcactcctattcaacatagtgttggaagttctggccagggcaatcaggcaggagaaagaaataaagcgtattcaattaggaaaagaggaagtcaaattgtccctgtttgcagatgacatgactgaatatttagaaaaccccatcgtctcagcccaaaatctccttaagctgataagcaacttcagcgaagtctcaggatacaaaatcaatgtgcaaaagtcacaagcattcttacacaccaataacagacagagaaccaaatcttgagtgaacttgcattcacaattgcttcaaagagaataaaatacctagcaatccaacttacaaaggatgtgaaggacctcttcaaggagaactacaaaccactgctcaatgaaataaaagaggacacaaacaaatggaagaacattccatgctcatggataggaagaatcaatatcatgaaaatggccatactgcccaaggtaatttatagatttaatgccatccccatcaagctaccaatgactttcttcacagaattggaaaaaacgacttaaaagttcatatggaaccaaaaaagagcccgcactgccaagacaatcctaagccaaaagaacaaagctggaggcatcatgctatctgacttcaaactatactacaaggctacagtaaccaaaacagcatggtactggtaccaaaacagagatatagaccaatggaacagaacagagccctcagaaataataccacacatctacaaccatctgatctttgacaaacctgacaaaaacaagaaatggggaaaggattccctatttaataaatggtgctgggaaaactggttagccatatgtagaaagctgaaactggatcccttccttacaccttatacaaaaattaattcaagatggattaaagacttaaatgtcagacctaaaaccataaaaaccctagaagaaaacctaggcaataccattcaggacataggcatgggcaaggacttcatgtctaaaacattcaaagcaatggcaacaaaagccaaaattgacatatgagatctaattaaactaaagagcttctgcacagcaaaagaaactaccatcagagtgaacaggcaacctacagaatgggacaaaatttttgcaatctactcatctaacaaagggctaatatccagaatctacaaagaactcaaacaaatttacaagaaaaaaacaaacaactccatcaaaaagtgggtgaaggatatgaacagacacttctcaaaagaagacatttatgtagccaacagacatatgaaaaaatgctcatcatcactggccattagagaaatgcaaatcaaaaccacaatgggataccatctcatacaagttagaatggtgaatattaaaaagtcaggaaacaacaggtgctggagaggatgtggagaaataggaacacttttacactgttggtgggactgtaaactggttcaaccattgtggaagacagtgtggcaattcctcaaggatctagaactagaaataccatttgacccagccatcccattactgggtatatacccaaaggattataaatcatgctgctataaagacacatgcacacgtatgtttattgtggcactatttacaatagcaaagacttggaaccaacccaaatgtccatcaatgatagactggattaagaaaaagtggcacatatacaccatggaatactatgcagccataaaaaaggatgagttcatgtcctttgtagggaaatggatgaagctggaaaccatcattctcagcaaactatcgcagggacaaacaaccaaacaccgcatgttctcactcataggtgggaaatgaacaatgagaacacctggacacaggaagggcaacatcacacaccagggcctgtcgtggggttggaggaggggggagggatagcattaggagatatacctaatgtaaatgatgagttaatgggtgcagcacaccagcatggcacatgcatacacatgtaacaaacctgcatgttgtgcacatgtaccctagaacttaaagtattaaaaaaaaaaaaaataagatcaccctccctgatgtgggtggctctcattccatcagttgaaggccagaatagaataaaaaaagagaccttctctggaaaaaaagaaaaatgcaaatcaaacccataatgaggtactattctacaccagtcagaatggctataatttaaaagtcaaaaaataacagatattggtgagattgcagagaaacaggaacacttatacactgctggtaagaatgtaaattagttcagccactgtggaaaggaatttcgcgatttgccaaagaactctgaactatcattcaatctagcaatcccattattgggtatatacccaaaggaatgtagagcattctaccataaagatgcatgtacatgtatgtttattgcagcactagtcacaatagcaccagtatggaatcaaccatactgctaaagaaaatgtgggacatttacacatggaatactacacagccataaaaatgaatgaggtcatgcctttgcagcaacttgaatggagttggagagcattataagtgaactaacacaggaacagacaatgaaataccgcatgttctcattcataagttagaggtaaacattgcgtacacatggacacataaaaggaacaatagacactgggaccttttgagagtgaagagtgggagaagggtaaggattaaaaaactaccgggccgggcgcggtggctcacacctgtaatcctagcactttgggtggctgaggtgggtggatcacctcggatcaggagttcgagaccagcctgactaacatggtgaaaccccatctctactaaaaatacaaaaaattagcagggcttc[133 bp omitted]ctcaaaacaaaacacaacaaaaaacaaaaaacaacaaacaaaaaacaaaaacaaaaacaaacaaaaaacccaacctaacaggtaccatgcttattacctgggcgacaagataatctgtacaccaaacacttgtgacacataacttacctatataacaaacctgcacatgtgtttctgaaactaaaataaaagtttgttgttgttttttttttaagttccctatttgaagaattcccttagaatttagaatcagggaaaaatgttatttcccttgcattggtcttttctattgagtaacaggtattgtgtaacccattatatttccccttttgccagtgttgctagaatgcccacaattgatggaaactttatttatagcaatgaggtagtctttgtggttttcatacttgtttttttcacttttaaagttactgcatttttatgcttctatagatggctctgatatgtctttatattcttcctatcttccttcttttctgtttttcagttttaattgtctttattgtttggattttttaattcacaaaataattctgagaaaaagttatctttgtgattctcaaatatagaaagaaacaacttaaagtattagaatcttcctttcttgactttctgttttccttagtttaactcgaatgttgatctttccttatataccctatcaagatttttaaaacatgagtttatttattttttattttagactcacgcggtatatgtgcaggtttgttacatggcttctttttttgaatggcaagtggtgtgagtaattaagtaaactgatatactttgagcctaggccatatacgaccacaaaatctacaagttcactccttgctgggtgcagaagaaatccttttaacttaaaacctctcagatttcaaaggaggcatcctccggcattgagaggcagcatggttcagtggttaaggaacctgtggcatcaggagcctctgtacctgtggctttagtatgactgtccttattgcccagatgagggcactccctgtgtaagagttaaaagtgtggattgctgcgtgagagagagtgaaggctgaattccatctttgctagtactaactgtgagactatctttttaatccttggttttctcatctccagggtatgataatagcaatatttatctcacggagtggttgtaaaatttaagtccaatgtacacgtaaagccctggacatggtctaacccagagagtgtccagtgagcactgatgggcatgggactagctgtaggccacttgtggggtgaggagctcagtggaaattgaacccagctctcctgaccccaggccagtgccctgtccagtaaaccaggtgatgtgtaaccccatccaggctcccctctccttgctctgttgtcccccagatgtgctgggtaacacatctgtattttaatgtccaggtgcctcctggaaacagtgccttggaccagtggagaggctccaagggtgggatttcctgagggaaatttcagatgttttccagaacctctgcttagcctgccaacctggtccccaggggactctttgtccatacatttgcctctcccacctcaccaccccgccaggagctcagtagggtctcacctgtgtagtaaattcctgacgtttcatccagaggccattgggtcccaggagcctcctgctctctgggtgctaggctgggctgaggtggggatccccagctccccagcactgctgtggatgtgggggcgttgggtgactcctggcttggagactcatggtctggggagcttggaagagcttggtagaggagtgaggcagagatttctggggggaatgaaaagaaaaataaccatttactgaacatttattttcttttaggtgcatatattttaaactctcacaacagtcctgagagatgggtcttaataatattattttgaaaaccatgttgaagtagaggggcaattttattctcttagtagtgaagagagaagtcatgtgagggagctggcttgggccgaggactaagcctagcctcttcttggggtctgtctggaaaacagagtcctccttggaacttctggaccaccctgaccctaaggatcttcagagcccatcaatattatgagctgagttctcgggcaaggaccatgtcacgagttgggcacccagttggggaagactcattgcctgacccacatgggtctcagcttccccatctgccacatggggagggatgcaatctcagcaccggaaggtccctgaaagatcaatttcaggcctacctctcacagcccatcctggctcccctatccttcctctgctgtcccccatgtcaggtccccatgcacagacatgatcctctgggtggggcccaccagctgattcacagctccacccagggctgtcagcctgcctcagcaagcctcacctctccagcggcgtccagatgtgtcaggcagctgtctcaaaacccttctctctgagccctgggtgcaccccgccggcaattcatggatccagggcattagcactgcggtggaggtgggttggctgggagaccccaggtggggttcacttgggctgtaggggaatgagggagagtggcctacaggaaagagacaaagaggttggagacacatcagaggggcaggggcaaggtgccagggaactgagctggtctcctctctcaaccaagagaggtcaggatacaccagtgaacccgctgcagccctctacaacttcctctagaggcttgtctgaagaatgatgttcttatagatactgctaggcaaaaaatcctcatctaggatcaggaaatttgcatatctgtcttggtcctgactatctccctgtgtaaatcactactcctactgagcctcagctgtgctttattgggccaacggcatctgcaacccagggtggctaatagtaataataacagcagcagcagcagcagcaacaacagcaatgggagatcttatttattgagcacttactgtatatcagactctgtgctaaatgtttaacctggatgatctcttttaaccctcacacagcccagggaggcgggctctcactctcccattttgcagacagagaaataggcagagagcagtgaagtgattggcccagggtgatagtgccaggactggtgatagtgcctgactcccaagtccgtgctcataactacaatgccaggcgagtaccgggaatgcacttgaatagaagagggtgtggggctctgaggtgcagcaagggcccccccagcaagcctcctggctccagcatagtctggggcctggatccccctttgagagggcagttccatgtcactgctcagaggaaggcctggcagggagggctcagtggtggggtcccaagagggcagggcaggcatgagggccaggggatgtcccgcgggcagtggggtcctctgtccactcacctgccccttcctgggcttgggcgcacagtgacctcagccccatctgctcccaggtatggagggctaggtcccaggcccgctgctccccatactgagccaccaggtacgaggccacctccatgccactcgtcttctctggctgagcgggtgtctcacccgaagagctcctggagtgcgctttattggcgagcagaagctggaactccttcagctcctccttcttcaggaactccaagtaacaggccaggcggccccaggctccgccagccatctctgtcccggagttaagagggtgtctgggggatgttcccaggtggtgagggtatcaggcaggcagagaacagtgctgtcctttgccttggctcttaccgtctcttattcagcattcggaacccagttttataaatcccagggcacctacagatagacgccgatagagggggagtggtaggaaaagccaggggagggaggagcccagaggggcctgcaagacactggaagaagtcagctgatagggaggtcctgggatggggtccagggccaggcagggagggtgagggtgaggggagatgtggtgacgggagatggggtgtgggcaacgctcactgttctgtgttcctcagattcttccctctcctgggtcctggactcctgagatcaacccttgagctgcaaggctgagaagaggtggggtgggaggagccgcagagcagggaatgggctttcagaacccagagtggagccccgggctgctggctcccaggtttcttcagacctctccaggccctggggcaccagccagcaagaacagcgcctagtcaacaagagcaggaaggaaacgtcacccagaggaaacccacaaggggcgtggccagggggtaggatcaaaccaggcctgggtaggccagactcagagtcacagattcagatgggccacatggcatctataggcggaccaggagcacaggcccagaccagctgacgctgcagcaggtacaggcccatactaaacacggtgtgtgcacctccacatgggcactccgccagcccatcatctagagcctgtctgcagagccaggatgcagactctccgagcagttgtgtctgcagcccaggcccagcctctcaggatgggtggggccccctgtgtctgcccgggcagctccttattgggaaacattagaactgggccagggagcatttttcccagcctctcatggttttgggagcttcttgagttgcactgcatgtcctgccatgctaccaggggcactaaagcatgtgtcccaggcccagggggctgtttgccttctgggcagcccagcacttagctggtgaacatttccacctgaaagcagaacagccccttcctcattcctgcaagcaggcctcggggagccaggggcagacttcctctttcgtggaatctgcaagatgccaatgacttcaggttgaggaatgacattgcctactcatttgctgatgtaacacaccaccaggaatttctggagatgctttggtttcacttggactggcagagcccaggcttcaacccacggcttgcttggacaaggactccttatgtgcctgatttatttctttgagcctcagtttgcccatctattaaatgggacatcataggtttaccaagaggcttcaattcagcaaaaggtcttagagtctctctctctttcccaggctggagtgcagtggcaagatctcggctcactgcaagctccctccacctcctgggttccagcgattctcctgcatcagcccagcttcctgggcagttgggattacagtcactcaccaccacgcctggctaattgttttgtatttttagtagagatggggtttcaccatgttagccagtctgatccgaggtgatccgcccacttcggcctcccgaaatgttgggattacaggtgtgagcctccgtgcctggcctaaataaattttataaatgttagttttaaaaaatggctaataagcacattgtaggacattctaatatcagattgaccagaagtggaaaagtgctgtgctaaaagtgggatgatcgggaggctctgagcactccgtgaaggaccgtgagactccatgtagcgggaggaatggcctggaggagggctgtgtgggctttttttcctcctcacaccagccagttctggcaccaactctctagacaccaactggtgtcctacagtgcaattctgacactgactgcctggagttggcatcaaacctcacaggtttagggtttcagtgaagagctggcctcatatcagatgccagttgcaaatggggtgcccagaccactggcatctctgtctgacttggtgacaaattcaagggttcccacagtccccggcaggttcaataatttgctgaaatgactcacaggactgagaaaagcactttatttattattatcggttcatgatggaggatacgactcaggaatagcccaacggaagagatgccgaggtcaaggtgtgggtgggggaggggcacagcgcttccttgccctcccgggcaccctactctccctgcccctccctgcttcactaacctggaagctctccaaaccccaaacaaacaagactgtggggttttctcggaggtttcacttcacaggcataattcattaaatcactggccgctggagatccactcaacctgttaaatagatcagaaacctgacccttcccaccacgcccactggggctgctggtccagccttcagtcgtctcttactgggatcactgtgctagccttccacatgttctccacccatgctgatgcttcccctttactgtctactctcagtctagaagccagaattatccacttaaagcataaattaggtcaggtcacttctcagctcaaaactttcccatactccatctcactctgagtaaaaaccaaagtccaaccaaaggtgtggtgactcgtgcctgtaatcccagcactttgggaggctgaggtgggaggatcgcttgagtccaggagttcaagaccagtctgggaaacatggcaagaccctgtccctatgacataatattaaaaaacttcccaaatccggccaggtacagtggctcatgcctgtaatctcagcactttgggaggctgaggcgggcagatcacctgaggccaggagttcaagaccagcctggctaacatggtgaaatcccatctctaataattataatacaaaaaaaattatccgggtgtggtggcgcacgccgtattccttcaggaggctgaggcaggagaactgcttgaacctgggaggcagagattgcagtgagccgagattgcaccattgcactccagcctgggcgacaagagcaaaacacagtctcaaaccaaaccaaaccaaacaacaacaacaacaacaacaactccccaaatctcccagagccctcccaatggttcccgggggctgcatgatctagcccctgatatctctccggcattatatcctaccctatccccctccctcactggatcctcttagtcttttccctgttccttgaatacaccaagaatactctcactccagggcctttgcactagtctttccattgtcttggaatggtttccccagatattcagaggtgtgctatccaaccttctgtaaagtagaattccttcattccgtgcttcatttttccgcatgacacttattattgcctgacgttacagacttgtttatttgtttaccttctgtcaccccctcctgccaataggatgttaggtccctggagacaggacttggcttgttttgttcgctgttgtatccgctatgcctaaatcagtgcctggcccacaatgtcagcacaatcaataccacagacattgaatgtcttttgaacgctttcctttaatgctttccttcttatccttccaaacagctactcactctggccactagatggcactcaagtactttctgagaattgaagcagcctcatgggtttggtggagaggacccactggcgctctctgagcctgaatttttaaaattatccctgtttctggtgctttgggcctttgtttcctttccttgaggcattttaggaacacattaaaactcacttttattcaagtcatgctattttcaattaaaacttaactcatgaggaatatctgtatggccagtactccagcagagtacagtgaggccttctctttaggttcaaattactatgacttgaatcaagatctggataacttgaaatcagcctccttgaaattcctctcctcccacctatttctaagcgtgtcccaggcattgcctcatggggttctgaagtcagttcttggttcccctctgatcgactggtcttgactaccttgctgccgtccctttggtctcagaccccatttctatcctcctgaagttgctgggcccaggtgtcctctctgtcaccaccattttagggcacggctcttttctggcccattcctgaaatgtgggacaagattttcccaatttacggcacagctgagaccgtgacatgaggatatgattttgagcaagaacttccccaaggttcagggatgaaggatagtaaatacatcagggcatcactctctgtagctgtggctcacactgtcctcagagccctctctggtccaggatcatccctgctatcccttttccagctggagccctctgtagctctggtgctttccattacacacaggcaggtcattgcccagcctcaagattctgcagcctcctctgccctttggaggccaggaccctctggctctaatacttagaaagagaacaagctgtcctacattcacatcactcctagcacaggccccaggattatcctccttccaggatgatcgacatggaaatatctagtcccttcaggtgtgtgcttggtattgttggaaataaaagctcggagtcacagagaaaatgagcactcaaataaaggattttttcagcaaggcaaatttacttctggagaagggtctcgcttgcccttctggccactgcaagagcacactgaacaaaggagggaaggggtttttatccctgacccagtcagtccctgatgctgtgtccgggccccattggctggagttggactgcgcagtctaagctgatcctgattggctacttcaaatggagcaggggtgggggctacagcagcgggaagagcagttttggccaaataaggtacagatgtgggttgtttcagattgtgaatggatgtgggttacagactgggaatggatgtgagttacagattgggaacggctggaaggttgtttactgtaactaggggcaaggaggcagaacagttaggctttgaaaatagaggacaaagaatgagagaattgaacaagcggaacctttgaaaaggaactcactgtatccaacagtgttatggacccaacaagatcatctcaatagtttgacaattcatttcccccaagttggtgtgtttcaggcttagataaaacggtgctttgaacatcaacaggtgaaatcttttgttaaaaaacatagtctagttcatccagccctcctcctctccctgttactcctcttcctccttctagtctttcctccagtgtgaagtgaaggaaatattaggacttggtgttgcccctaccatggtctgctttaatgtcctgtgaacttggacaagaatacacatacccgcatcaccatcttccaagaacacacgatagccaaaggtcacagtcaatttacatcggttacaacagaacgcatctctcactctgagtattctcatttgatcttaactgcatttaaatctcagtaaagaacaatgacttgttcctgctttataggcctaaaacacccaccaataaggtcctcttagaaaccaggcaaggcacacccaggtctctatgctaaacggaggaagtcatgcataacttttcagagaccctttttactttgaaaacatttcaaacttacaggaaaatgtcaagagttgtacagtgaactcccatataaccttaacctacattcaccaattattaacatttactattgttttatcttttaattgtgtttgctgattattgggagtaagttgcagatatgataacatttacttcttttttttttttttcccctgagatggaagcttgctctgttgcccaggctggagtgcagtggcacgattgtcagctcactacaacctctgcctcctgggttcaagcgtttctcctgcctcagcctctctagtagctgggattacaggtgcctgccaccatgcctggctaatttttgtatttttgtagagatggggttttgccatgttggccaggctggtctcgaactcctgacctcaggtgatctgcaccccccccccccttggcatcccgaagtgctggcattacaggcatgagccatcacaactggcccataacatttacttctaagaactttggcagtatctactaagaatcaggatgttttcttatatgccactgtacaatgataaaattcaggaagcttaaaacattgatgcaatactactatccaattacatgtaacttttaaaatgacattttcatcttgttgtttagatttattaggattataaaaatataatacagaaatatgtagggggaaaaataaaaatgttcttttgactttctgcaccatcagatctacttcccaggaataaccaatgttacatgaatgtttcagtgttccacgaaaaaaaaaacacagttttacatgaacacagttacttttctatgtgccaaatatataggatctaagttttttaggagtgaatttttttcctcttaaaatattttgcagatccctccatgttagtacatatggatctaagtcgttctttcttctctttttgtaattgttgagtttttcatagtttggatctactataatttatttgattagtcaaatttgatggaaatctagctggctttcatttgcattttcctgttaccagccacatggtgataaccaacttcgtacacaagtgtatcttatcacacacatgtgagtacctccaagggacagagtcccagaaaaggaatttctgggttgaagagatcacacatataaaaatttgggttcagaaatgtgcttcatgcctgtaatcccagcactttgggaagccaaggtgggcggatcacgaggtcaggagattgagaccatcctggctaacatgatgaaaccccatctctactaaaaatacaaaaagaaattacccgggcatggtggcgggtgcctgtagtcccagctactcgggaggttgaggcaggggaatggcgtgaacccgggaggcggaggttacagtgagccgagattgcgccactacactccagcctgggcgacagagtgagactccgtctcaaaaaaaaaaagaaaaaaaagaaatatgcttctcttgagagttcattatttttgtctttcaaccacggcatcaagcaactagactcatgcatcttttatttgtcttctgggaggttttcaagtcagaggtttggcccatctcttaaaaatgtacatgccaagttcaatcttaaagcacatgatatgtctacagtgttaactcctggtttcatcttattttctccctactcttgttttaattttgcttgctgtacatactaaggtaataacattttaattttatcatgtatctttatatgtatgtaaatttgttcactgagtcgctccagaacaatgtgctgtgagtacacaaaatggttgaatccagttttctttctttcctcccctcccctcccctcctctcctttcctttccttctttttttttttttttctctcaccctgtcccccaggctggagtgcagcggcacgatctcggctcactgcaacctccacctccccggttcaagcgattcttgtgcctcagcctcccaagtagctgggattacaggcatgcaccaccacatccagctgattttttattttttaaatttttagtagagacagggtttcaccatgttggccaggctggtcttgaactcctgacctcaggtgatccgcccacctcggcctcccaaagtgctgagtttataggcatgagccactgcacctggcctgaatggagttttcttaatgacagtcctgggagttgggagacaagcagatgacacgtctgttgaatgggacctgtttcataccaggcactttgtagagttagctcatttcattttcccaactatttttttaagattaaaattattgtccctattttgcagatgagaaccagatctataagactccaaagcctcctccttcccatgcatcgcaatggcactgatatgctgagtcgtgtgctcgccgagtgaccagccagcagatccctctccaataggcttgtcctcctctcactcccgaggctgctttcggcttgctccgcgcttgccttggccattacatgggggaagcccgagcctctcagaacgtatctgtacctcaagtggattgttgcctacccctccctatggaggcttctgagctagaaaatacagaggtcagatgatggccgctgagaacatccagctccatggatgacaatcaaagcaagggggctttaagtgcagcaggaggaactaggattagccctggggtaggacttctgcccagtgagggatgctaagttgtaggaatgagataggggaggttagcgtggaattcccttccagaagcctttaagaataagctaaatttgcaactgtctggggcttactgcggagaattaatgacgccccttgtgacagccctgctaaacctccctagaaaactacaaatccatgatgtcaactggtcgttaaactccattactccaggctctcttttcttgacaaaatttaatttaggccagtaggtggcgataattaaacagctgattaaacagggcttcttctaatcatgagagaatgcattaaaagcaatctggaaggttgcttctgggagcaagaggaggaacctttctgtgaatccagtgctgattgaggtgcaattagcagatccactaacgggatgcctctcctgactcttaaggatctcctaggctcccaccgtgatcacttttttttttgagccatggtcttactctgtcacccaggctggagtggcagtggtgtgataacggcttactgcagccttgacctcccagactcgagatcctcccacctcagccccccaagtagctgggactacagattcgagccaccgcacctgtctttttttttttttttttaaacttttttgtagagacaggatcccattatgttgcccaggctggtcttgaactcctaggctcaagaaatcctcccaccttagtttcccaaagtgttcggattacaggtgtgagccactatgcccagcctatgatcatttttccttagactggaggacaaggctctgctgcccaatggatcttgggcagattttttttttttttggagaaggagtctcgctctgttgccaggctggagtgcagtggcgtgatctctgctcactgcaacctctgcctcctgggttcaagggattctcctgcttcagcctcccgaggagctgggactacaggtgcctgccaccacgcccagctaatttttgtactgttagtagaaacagggtttcacc[140 bp omitted]accaaggcccatctgcagtttcccccagactagggagctctccggctgcaggggagaggccactgattcttgatgtgttcttgcctatttcttacactataacttttttgagggcagggattatgtccattttgcacaccaccatacaaccggcacctaatgcagtggattagttatatgtaagtagaagttcactatgtgttgaacaaaggaatgaatgaaggttaggacaagagctggccttcatggagctgtccagggttcttaccagtccctgacttccttcgacggattggtcttttgctttcttgccttcctcccagggctttgcggcaacacgacacagaacctgttcctcgcatgtactcacggaatcacgcacctccttgacagtctcactgtgtctgtggcggcccccaaacagcctgctgagctaactccgaaagagtggttctctctgcacagaaccactcgggttaaatgcctcattcttcatctgtgtctatggagtttttagttctgaatcccagtcccttccatgtcactacggttgaaggatgtgtggtaggaagtggcacgagaggttgctggaggggtgagctggggccagtctgcaggggcttagggcatgaattcatggggcagggagtgtgccttgcccatctctgggtgctcagtgtcctgcacagttccaggcacaaagtcagctctcaataaaaggcgcataatttctcatcgtgcaggactgtgcaaggatatggcacatgtggacctggctctaaactcacccccctgaaatgtctcagttgatattttctgaggagtagaagacgaaggattgctgtttacatttatttcttctttgtatttgtttactcacatctggattggctaaaaaaaaccccgttcttgattcttctatgttgcttcttagtatctcagactatcatataatacaaggctaagatagggaggagggagggaagaactgggggaaaaaaaggagaaactaggggagtcaatctaagaccaagatttcagtctctcaaacaggctctggggaactgaagtttctgctccccagctcagaaatcagtgggtaaagagataaaatttcagagccattaaaatagatgaaccaagaagtggatacagggagccatttgggaaaatgactcaaaccttgctctggtatgattcagggaactctgatgtcagtgcccaatgtacaactgcagcaaaaacagtccccaaggcctggcaccaccaggcacatcctcagggctctgggctcattctctctctttgcacatcctcagggctctgggctcagctttgacctcagcaccaccttggaaatgcacacagactgcaaagctcaatgccaggccacgtatcaggggcctgcaaccctcatcctccctcacagtgctctgtccctaagacagctcatttcctgtccctggtcctcctctccatcctctctgctcatcatcatttctaccatgcattaccctgtaattgcctcttaaactttctccctgtctctgatcacaccccttccaacacatccttcatgtaggtagtcagagagacctttctggaactcgtacctcatcgtatcacacccttcaataaaccccttctatgactccccactgctgtgtggtgctccaggtcctttagctctggtacaagcttcaggccttgtctgtatctttctcccgacatggtctccgtgtcagccttgccttctcggcgtctccagaaccactgcgttctgccacccactgggtgcctttgggagactgctccctctatctgggaggctttctccgacttgataaactcctcctcctctattccagttcagatgtcatctcttgcaggaagccttctcccatgtccccaggcacagttccttcactggccacacataaattatttacttcttgttatagcgagctgtgcactatctgttacccctgtcccctggaccacgagtactttgagagcaagagtgatagcttatttctatcagcatccccttcctcccattgcccagcagagtgcctggcacatatttgatgcatagtaagtatttggagaattgtaaaattaattgagcccataggatggacacagaagtctgcctcgtggggacaaactcttcagtctagaaggatggaagctgagaaaggacacaaccgaacgctataaaacgctaaggagaacagagaggggcacatgaactacgggtgtctgtttttccagtggtccctcggttggtcattgcccctggcttttagatccatcccccgtctttctcctgcaagctgtgtttcccaggttcccttgccacgggtgtttgtctaggtttggcaggagattggagcatgagaggaagggagaggtcaggccatttctccttttctctctgctctgggtgggggagggcattttctggccatggctgcatctggacagctgtttcaggtcccagctggatggcccctcacaccacggtctcagcatttcctggcaatctctgctatggttctagctcgggctgggtggccctggcttctcggttttggtaatattgtcacccccgtgtcctgcagctgttggaggggaaactagcccctgctgttgctcatatttgggtggctttaccatctctgcgtggcttcttcatcttttttatcctcactgtggcccgtccttcctatcaaattccctgtgatggaaatactagagtggtttcggttttcccgactagatcctgatcatcatagtcttctttcatcagtcagctgaaggttcagtcctggggttcctagaccagcctctgccctgggttctacccataggggtctcttgtcttggccacagtgttcctgcaagccagccattggtggcccttataagcaccagtgttgcctcctgcagctatttgccttatgattccctttcagagatttcggtgatctggatccttggctgaatcaatgcttctgttggttcttatggaggaggattctgaatcctggcggagtggggtaggaggctttgtgcaagaccacaacccacatgtggccactacttccaggatgctaattaccttctgtgccttgacacttggaagaagagtgtttgaaacacattcagatgctagtaaactccagcaattcattatgccaagagctggtgccaataggaaatataaacccttcctgagaggcttggctgaactcaacaattgatcagtgtaggatgattaagggaaatgagtctgtcatgcagccaccccccactatggagcagtgataatgtgtcttaggggacctggctggagccagaaccggggctgagtggaccagaggctgaccccctggtggctctcacatccctttgcaggatggcaggagggtgaagggactccccaacccttggtggagttaaaggtgtaggaactgaggtgagggaaccagggctggagagatggatgggtcactccaaggcagcagatgggaccaggtgaaacctttcccaagagtggagaaatgaaaatacttaaagcttcagtttgacaagtatgtatgatagaggagaagagaaaaagctaagagagggcaaggaagagagatctgggcactagaaaaagggtggacatttcttttccttttttgtctttttttttgaggtggagtctcactttgtcacccaggctggagtgcagtggcgtgaccttggctcactgcaacctccgcctcccaggttcaagtgattctcctgcctc[134 bp omitted]acctcccaaagtgctaggattacaggtgtgagccaccgtgcccggccaagggtggacatttctataaaggtcattgaggagataggatggcaggagacaggaattcaacatgcaggacactgaggcccattccacaagacaggagcctgtggcttcatttatgtagtgcctgtgtgtgccaggtacgtgggaatgcagaggtgaaaaagacagtgcctgctctttgtgtgctccacaactgtggagactgagaataaaggagatgaccacaattcagtgtggtatgggctcaggtgtgtgggcacaccagttgctgtggggtttaaaagaggagcacctgagttaaggaaacttgggatgccaggtaaagcttccaggaggaagagatttctgcatggagtcttgaaggaaaaactgtagttatgcaggaagaggaagcagaggggctggtgaaggcatcacagcatctggagagtggtacccaaaggcctggagtgagggagagctgggtgtgttttgggagctggatgggtgatgatgtgagcagaggctggagaggcaagtggtggtggaggtaccctgggaggcctgatgctactaggagtttggactggcctcctgcgagtcatgtggagctgttgaaacaatatgctggaggagtgatacagggagatttatagtttagaaagattcccctggctgcaacggggaagtgtgatcagagagggtaagaccgaggcaagaagaccacacaggtggcacttgtgatggttcatgtgacaactgcttcctaccagcccaggctatgctgtgactccagacagtccagctataacaaccaggcagagggagcctgtcccatccctgaccaggatctgtgggccctaatggggctcactctggcacggagagagggaccttggggagctgctttgggagcagaagtggcagagaagtcagctggccaggctctgagatgtgccctgtcttctgcagctgaccgcagggccaatgcggtttgactcagtggggccagtgctttgcaggtggaggcagagatttaacggctgctgctgctgagttgtgagagtgagggtttttcgggaatgtatgtgaaggaggcatctctatacagctaaattcctttattaacttaatgagtttggctgctttcctggaaatgcaagtgccatttggcaccatcgctgctgcctcagaaagggtgtcattacactaagaatctgtaggaacgtagaatagtgataaacgaagctgcctgggagattacacagcatcacgcaggcttcacaagggctttcagaagggggagtgctttcactctgaggtcagtacccagttaggggctgggagtaggggtagtagagactccagtcattatctggataatccaatcaatgcaggtaatgctgcataatattgggagggagaatattagaatattaaagtcattttaaagttgaaatataaactttaaaggggtcacaataccttctagcccttctctgtctcccgtgtgctgagcaccctcaaattgaggtttctaaaggcaggacccaagtctaaaggctttgttctttctgtattgcagccttgcatccgattgtccaggtggttcccagacccactgacaggcagactcgaggcaaactgtttcttccaaacgcctgaccagatttggaacaccagaggctgagactagatcactgggtaaagtgggaacagaaatctctttttccatcccttttgttcgttggaatgggaggagccttgaagctagggggagacttgggaagttattgggcttttgaatttataattgtgaaatcctctttctctgaattgagtttggacttgagagttggttatgaacgctgtgtgacaagaaaattttcccagacgatgtcagccagcggactttgtctttattcacatgatgctaagttcccaggagccatggctgcagagatgggacccagtagccacaacaagctcctcttcctgatcacctgctgtgcataagtcattctctctaatcctcatagcaagcctgtaatggtggcattagtcttttgcagctgagaagtgggggctcagagaggttaagacatttgtgaaagcccacccagctggaaggtggtgaaggtgggattgcactcagattgtcttaggcccaaactggtgcctttccccacacacctctccttgccgacgggcaaggtgtatattggggatctgtggacgtcaggtttgagcttagcctggctgggaaaagtgtctgtggtccctccacccactcttggctcctatcccaggcaaggattccacatggttgggtgcttttataaaatttttatttttcaattacatgctcattgcaacaaatccaaacaacataaaagtggataaaggaggtggagaaggactgtcctccccattccagtttgagacctttttctttgcttctgacacgtggagctgaaggggtgggctcagcggccagatgggccggttcgattctgggctccactacttgctaactccacaaccctgggaaaattacttaacttctcagtgcctcagtttcttcatctacaaaatgggataatagtacttatctcaaggggttgctgtaagggtaaaatatttaaataattggcaaagaataagcatttaataaatcattagtgatttttattaaacatggcttttaaaatccaaaatgagtattaacactctacagattgtgtggcaacttcctttttcactttacaatatgttatagacttctttccaagtctgtacatatggcaccttttaactggttgtgtagaattttattggcagggatatactataatttattcattcagatgtgaatgcacatggaaattatttccacttttttttttttttaccattacaaccaatgttacactttgtgcctcacatggtcttactaatatttctgtaagatagagttctggagcaagatcataagattttagggtatttgtattttaaatttgattacatgttttacaattcaacagcataaaaagaaaacctgtttcctcaaccttcaagaacactggatttactcactttacagctgttgggttaaagaaatatccaaataacttcacacaagatgaagatatttatacagatggaagtaaagttcttactttacaccatagatgtgcagacatgatataaaagaaaacaaaaggctgtgtgcagtggctcaagcctgtaatcccagcactttgggaggc[136 bp omitted]gggacaggagaattgcttgaacccggaggtagaggttgcagtgagccgagatcgcgccactgcactccagcctgggtgacagagcaagactccgtctcaaaacaaaaacaaaaaccaaaaaataaaccctccaaccccacaaaaaaatatggcaaaagacataaagtcccttcagcacaattttgaactacagatgagcgtgtttagggagcactcccaacattatttaatccttacgacatctactcattgttacccccatttcagaggtgagaaaactgaggcatagagagattaagtagtttgcttaagatcatgcagctggtgcatggcagaacctccctcatgtcaggacctgctctccggtcagccacactacctccctgtagaggtccacatgtgctttggactggaagaaactaaagaggcttcaaggaagtggaaacttcattagctcgaggtgcagagctccgagtggttccatgcattctgcatggctttagatgattttcccatctgtgacgcagaggggctgagctgtaatagggaatcactggggtggacagagagcatcttgtccctctctgcgccttgggatggagagactgggaggcaggcagcaggatggttcatctgcagttggactgcattagcattcccatatatttatacaaatagcccccagctcctcttgtgctcattttccatacatgcctatcagtgtagtaaatcctgaacacttctgcttaaaaaaaaaacaaaaacaaaaacaaaaacccaacaaaatagaatcagtgccttttgtgttcaaaagctaagtgtctataaatcagactccttgaatgagaagatgtatgtggattcatgaagacagggctttgaattatttatcaagaagtggtgctacttggaacttcaggcacactcagctccacaacaaaactgagtggcttctcaagatgtctttgtggacttgatggaggatgacatggatttaaagaattaattagacatggggcttcttagcatctggtacctgcccacatttccaatccccatatgccccaagctgcagcctcacccaggcactcagattcctgaaacatcacgtttgcacacactgttttctctccttggatgttcctctcttcttagccaccctgcatactcctatgcatctgccaagagctagcctaaatgtccccacctctttttttttttttcggaaatatttcctgccttctcttgtcagggttactagctgccttctctgttaagtctgtctagatacaaaatacttcaagagcatagttagttatgtctacctatctgtcactagaacagtgtcaagcacatagtcaaaatttgggttgtcgaatgaggggatcatttgatgtcagtgaggagacaacccttcttggtcagcaccacgtgtctggcatgcgatgataatttaatttcaagcacaatgtgtctaatacttctgtgagtattatcatcacagaataatacttgatcttatgatcaagatgctgaggaagatgctttactgactgcaggtaatgcaaacctggaagtgataataaacacactgaatggctattcggtattttaaaaaatgtggatagtttggcacacttgactgaaattaacaagatgccactgaatatggatacagtggaggtgttaccaatataaaggtctatgaatcaatggcagttggtggctggtgtgagggagaagattcacaggtgaccagggtattaaatagtcctccacatatgccacggtctttcatacccattggtgaggggaagcttagggttttgtctgggaaaaagcaggaataggtagagtttgagtcactgaatcctctgtgtttgtaataatgcctaccacttagtaggttcacaataaatatttgttgaattatgaatgaatactctagtcactttgcatttactttctgcttgcagtatcctatgcctccaaattttttttttgagaccctctgttgcccaggctgcagtgcagtggcacgatctcagctcactgcaacctccacctcctgggttcaagtgattctcctgcctcagcctcctgactgggattactggcacccgccaccacacctggctaatttttgtattttttagtagagacggggtttcaccatattggccaggctggtcttgaactccttacctccggtgatctgcctgccttggcctcccagaagtgctggaattataggcgtgagccactgtgtccagcccaaattcttactagttcttcaaaattgaactcagaagttaaccaactgtagggcactttctctagtggctacttccccactgggctattataatactctcatttaaaacataggacttaatacactgtgtgaatgctatttgtttatagcattcacacagtataatatgtgtgatatatagtatggatcccccataaaactgagagcttggcaaaagcaggggctggatttgatctctaatcaaccagtgaactccatatcattggtgctcaatcaatgtttgtggactgaatgactgagaagctctggcacataatttccctcagagctcagtggtctgagaattagagacaggtcaaaggacaaggtctttgtctatagaggacaagactgtagggcatgggttcaagggatctcagggtgtcactaagagcagcacttggtccagaatttgtagggagatgagtctcactctatcgcccacgctggagtacagttgtgcgatctcagctcactgcaacctcctcctcccaggttcaagtgattctcccgcctcagcctccagagtagctgggactacaggtgcacgccaccatgcctggctaatttttgtatttttagtagagatggggtttcactatgttggccaggttggtctcaaattcctgacctcaggtgatccacccgccttggcctcccgaagtgctgggattataggcgtgagccaccatgcctggccgaaaataggcaggtttgatttctaagcttcaatcatccttcaagagctttaagagcttctgactctagatctgtgcattgagtatgacatcacagctctgtctgagacattggaggtggaagagttcagagttatggcagggtccctggcctgggggcagtgatatagaggagaatgttgctggagttaaggaggctggagaactgtaagagcaggatgtcaagagtgatatcatcttggatgctgagttcatcaaggatgatatcaagggatggagtgtagagcacattttaaagatcacttcagactgaaaattacagaatggtccaacctcaaaaacacttaagcaagagaaggataatttgttggcttcgagtatcctaggaagggtagattagtcaagctatgggacagtcagggaagcaactgggtctcaagaactattggaaccagggattttaacgccaacaggtctttcactgtatgtgtgtctctgtccttttctctgtccatatcttgcttcttggacatgtttgtttcatttgccgtttccataatgaatcactttcttcatgtggcaggacacaatgcagttctgaggtttacttcttatagctttaatcaccaaagagactgaccttctgggacacacattttaaaaattcccagggaagagatccattatctcagagggagtgaggtgctcattccttgactagggccctcaatttgtcaccaggtaggttgggggaagcgcttgcagagtgaagttattgtgggaagtgtattcatttaagagacattcttcattttatgataggagatacagcaattgggatgactttggctgcaaataggagaaaaccttactcacactggtttaaataataaggaaatttattggctcatataatgtgaagcccatgtgtacaatggtcttaggttagcttaatccaaaggctccagtgtccttttttctgcaattccctcatctgtactctctttttgcttagtctttgtcttcagactgcttcctttttggaggcaaaaaagaggtagcagtttctggctccacatccacacataaaatccagaggaagagaaattgtctgaaagatttttcataataaaggaagctttattctcagaatcttccagcaaacctctctgtggtttcattggcttgaattggatcccatgccctttcctgaacaagttggtggctggtggatttcgtgtgctgactggctcaattctattcatcccagagcctgtggcaaggagactgggattatccagattggattagactaattagaggccatccaaaacacctgagtgctgcacggtaggcatgggtgtatcagttagctttttttcgcttctttttgttttttgagatggagtcttgctctgttacccaggctggagtgcagtggcatgatcttggcttactgcaacccccgcctcttgggttcaagcgattctcctgcctcagcctcccaagtagctgggattataggttcctgccaccacgtctggctgatttttctaattttagtagagacagggtttcaccatgttggccaggctggtcttgaactcctaaccccaggtgatccacccaccttggcctcccaaagtgctaggattaaggcatgagccactgtgcccggcctcagttagcttttgttgtgtaacaaaccacctaaattttagttgcttaaactatcatttgtttattacgttcagattttgtaggtgaacaatttgggctgtgtttagcaggatggttcttctgttgggcctaaatctctcctgcatttttggtcagctcataggtcagctcgggttgtggggtttatgacatctttgctgagatggctgggatgactggagccgctcttcctctgattgtctgagggttccaagagccacaagagagaacaagccccagggcacaaacactttccaaatatcttcttgccacacattgctattgtcccattggctgaagcaagtcacacagcaagtactgaatcaggtaaggggaagataaggggatggagaaagggctgggtgtggtggctcacacctgtaatcccagcacttggggggccgaggtgggcagatcacttgaggccaggagtttgagaccagactgggcaatacagcaaaatcccatctctaaaaaaaaaaaaaaatacaaaaactagctgggtgtggtggcaggcacctgtagtcctagctaccaaggaggccgaggtgggaggatcacctgagcctgggaggttgaggctgcagtgagctgtgattgtacctgtgtattccagtatgcgtgacagagtgagaccctgtctcaaaaaaaaaaaaaaaaaaaaagaaagagtgaacaaagttggagccataaacacaataatctaccccagtgaggagagctaacattgggagagagccactgtttctaccctaagatgcaaatggaaagagtggttctagagaagatgtggaatgcagaagactctgattccaatacaacaggagccacagggcacactgtgttggaagaagtgtttgggcacagtatatatctggagaggagatggcagagagagaagtttgcacttaggaccgaaagtaaggatggagggaacagttcaacctggaaacagtgccaggctttggactaggaatgctgcctgctccatcttatttggtccctacagctgcaggtgagaaaatgggctcagagaggttaagcaacatgcccaaggtcaaggtcacacagtgagaaagtgcggatttaagcccaattgtctgtggatctcaggtgtgaaggaaacaggatttggctgacgatggcagtgaaggagggggaggggaatggggtaaaggagtgctgaagtgcagagatctgtggccccagctcaccccaatgttgagcagagtgagcctggaccaagacgcctctttgccagcatggagttctggactgcaagctcctggggcatggacctcattcctgttctagtcctcctgcccacagcatctagcagagttctgagactcggcactgaggggcacatcccatgtgcccggtggtttactgccgctgtctcacttagccctcctaacagcacggatgtggcatatgccactattatccccattctacacatgagacaaccacggcctggagaactaagacacgtctttgtgtttgcagacttagtgagtagagaagccagggcttaaagatggggccgtggagcccaaagttcatgctctgaagtgctggctaggctgcctcagggaggaagcagtgcaccaaagggaagggtggcaggagggggagagcctggatatggaaaccctcacggtgaggggtttgacacgtcaccattgaaaacatgtgaggacttattactactctccaggattggactaagtgttttcttttctttttttttgagacggagttttgctcttgttgcccagactggagtgtaatggcgcgatctcagctcaccgcaacctccgcctcctgggttcaagtgattctcctgcctcagcctcttcagtagctgggattacaggcatgcgccaccatgcccggctaattttgtatttttagtgaagatggggtttcaccatgttggtcaggctggt[133 bp omitted]gctgggcactgtggctcagccctgaaatcctagcactttgggaggccaacacgggaagatcacttgaggccaggagttagagaccagcctgggaaacatggggagaccccctgtttctataaaaggtagagaaaattagccaggtatggtggcatgtgtctgtggtcctggctactcagaaggctgaggttggaatattgcttaagcctaggagtttgaggctgcagtgaagtatgatcatgccactgcactacagtctgggtgaaagaacaagaccctgtttcaagaaaaaaaaaaagtacttgaggatacatattacttgtttgcccatttgagaggtgagaaaactgaggatcagtgaggtgagctcacttgccaaaaaccacactactactaagaagaggcaaagctgcaggcaaatctggtcagggctaacctcaaagcccacgcttaaccactgcaccacccagcactttgctatccaacactgagtgcttcagccttgcactatccgggcccatgctgggtgcaagacaaggctgcaaaggcagatatttgtgggatgtgctgcaagctttgattacccagaagactcttgggagagggagggtcagacatttttgttgcttcttacgattgaatttttggaacactctggtgagagttgagttgagaatttggcacagagagagcaccccaaaaatgatggctgtgctgaaccaaattgtggctcttcctggagtgtgacacttccagccagaggccctcaggtatgcacaagagcagcaatgccccagacctccaaggactcaggacctaaagtagagcgagaagcccagatacagtctccctacgggaggggcacggtgagctccaggcctccacatctggacagagagctctcatcagcttggacgagccagatcaggtccctctgcacatgacgcctttctccttttcaagccattctataaactcccagtgctgtggccaaccaaacaggcagggctggagcaagaaccatgtcctcccttcgaatcaaacatttcccacaaacctttttctccccaaagtcactaataacaatcttcatgcccacagcatctgctaacgatttattattacacgggtagtataacattttcatacccacaccatttttcatcctaggtggagttaattgcaaatgactcccaagcaaacagcatttcctccagcaatccattgcgaacaatggagctccgattccccccaccaaatcctgccgccttgccccagctcccatgaccttctctcatttatcaccattgctctaaatgagtcacacacaccaatagaaaaggccctgaaactttcaactcagtggctcctttctgctaaaagcagctctaaaagcatgcggactttcttgaaaattgagttctagtttctcatcaaatggaaaaagaacttttccttaggggcatctctcaccacctatgtccatatgacgtatgtgaagtcgtgatgtcttggaggtggctgaggggctttcaggttcatttggttggtgacagaatgctgccaggtgagagcaaggctgcagagagcagagctttccaaattgctgcattttctacaactctaaggtaataaaactggaataggtaacaattgatgtttgtataattctactaagtgtcagagactcttctaagtcctatatgtatattttacatacatttaacatatatattaaacagcctcctcataaccattctgaggtaattactattagtatttccactttacaggtgaggaaactgaggcacggagagataagtgacttgtgacttgcccaacatcacagagctggtaagtgttggagtcaagatgcaaacccaggtgatctccatccagtatgagctctcatctgctcttctctctggcctttttgtagtgtgttaacctctttcctttcctatgttgacataatcgtttcaaagactatacagaaaagatgtcaagtgaagcagtgtgaatgaagacggtgagttttgtagagagggctgacagagggctgcgcctttcatagggttttctactcctaccaagcaataagaagagccccctctccctccacccagtggaatcatttcccccagttctgtgtctatgagagagcagagggagaggacatccctggaactggaagacctgcatttgaggaccagcgccctctctttccagctgtgtggtgtgaaaggaataccagcccagattctggcatggccttccattaactagctgtgtgctctcagccatgctgtttctttctctggacctaaattcctgcatcttcagaagaagggtgagctggatgatagccaatgttacatcttgctctaagtgaggcaattctagttcaggatacaacaatcatttcatctaatgaaccaacttcagatcattttagtggtggccacaaggtgtaccttctggagattaattccgaattcaagttcaggctcagaggaaaaggtggcttgatctatttgtgagtctaccacagactttggagggggaaaagtgaaagttacaacagacatctgacattctagttccactgtcctcactgttttatttatttattttttgagacagggtctggctctgtcgccaaggctggagtgcagtggcacaatctcagcttactgcaaccgggctcaagcaatcctcctgcctcagcctccctagtagctgggactacaggtgcacaccaccacgcctggctaatttttgtatttttcatagagacaaggtctcactatgtttcccaggctagtcttgaactcctgggctcaagaaatccaccgccctcggcctcccaaaatgctggaattacaggtgtgagccactgcactcagcgtcctcactttttacatgaggaaaccaagccctagagaggttaagtgacttccgttaagcctcacggtgaggtaatggtggagttgggattagaagccaattctgcatatttactatggaatgtcactgtatgaggagttggcagaatagctaacaatgaccgacatttattgaaaaatcactatatcctcgctatgtgtggtagacgaaattattgttcatcactcattccttccccctgaatctccaatccacaggcaaatgagtgagaaagtaagtgcttgttgttgtatgacactgagcttttgtggttgtcatgcagcaatagctgaccgatacagtaattggtatctgaagtggaatgctttcataacaaaaacctgaaatacgtggcactggttttgagactgggtggcaggtggtgagggaagtgttgtaggaggctagtaaaatggcactcatgttatgtaatggcaaaacgtttggcaaagctgtcacttggaatagtctggaaggtaaagaatgtgcctgaagcatttgtcacattggatgaaaaaaatctggggcaggatgttgaaagtatgtgctgactactgctaattgcattaagctcaaggaggaagtggccggcttgcaagcagaattttaaggaactataaagaggccagaaattgcacggtgggaaaacaaaacaatgtcttaccaaaccggaggtgtggccactacgatatagccttgggagataaaatttaggggtttcctctgtaagatttttgttgtttgttttgcagccaaagctgactgatgggtactctaccagtcactttgcatgcattatctcatttaacccttataataatcccagaatgtagatgtgattatttccatttcacagatgctgaaactgaggtgtagaaaggttctgaaacaggcccaaggtcacacagctatgtgaggcagagccagagttagaactcagtggtggaggctgggctcggtggctcacgcctgcaatcccagcactgtgggaggctgaggcgggcagattgcctgaggtcaggagtttgagaccagcctggccaacatggtgaaaggctgtctctactaaaaatacaaaaattagctgggcgtggtggcgcctctgatcccagctactcaggaggctgaggcaggagaatcgcttgaacctgggaaggggagattgcagtgagctgagatggcaccattgcactccagcctaagcgacagggggagactccatctcaaaacaaaaaacaaaaaacaaacaaacaacaacaaaaaaacctcagtggtggatctgaccctaaaacccatactcttaccagcaagcttttctgcctctcatcctgcaaacgctgccgttctccttactctgaatgtgtgtgagtgtggtaggcagaataatggacctccaaatatgtccccatcccagtccctggaaatgacaaagaggaattaaggttgcagatggaattaaggttgctaatcatctgaccttcagaaagggagattatcctggatgatctgggtgggctcaatgtaatcacaagggtcgttataaatagaagagagaggatcagagagacctttgaactgctatgctgctggccttgaagatagaggaaggggccatgagccaaagaatgcacacagccttcagaagctggaaaaggcaaggacacaaattctcccctagagctttcagaaggaacgcaggcttgctgacactgtgattttagcctcgtagtctcattttggagttctgacctccagaactctaagatgacaaatttgagtcacgaagtttgtggtagttggttacaaatagcaacaggaaaccaatacgagtattcctaaatgtg[136 bp omitted]gcctctggagtagctgggatcacaggcacgtgccactaagcctggctaacttttgtatttttagtagagacgggggtttcaccacactggtcaggctggtctcgaactcctgacctcaggtgatcagcctgccttggccttccaaaggactgggattacaggcgtgagccactgtgcccggcccaacatgactttctaagtgtatacctctccataaaagtctacatgtcttgggtaaggggagcccttttggtggcgaaataggggtgaagaagccagcagattcctaggacggctgcaagcttcagctattcctttattagttggccacaacacatacagcactgtaattgaactcagcaagcatgatatgcctgagacccacaggtaagtatctatgtgagtgagtggtatagccatccgtgttcaggtactcacacacgtgtgtgaatattcatacgtgcacctgtgtgagtgaacatgtcatctttgctcgtgtgtgtgtagacagatgtgtctatgtatgtgtatgactatgtgcaggcatgtgtgtacatgggtgcgcatgcataaggcacttgagaacacatatgtacacctctgtgtgttatgtgtgttgtgtgcacatgcgtgcaccctggattcacttgggcattttgggcctgagattagaaccctcctaacccatttatctggcaccttcctgagccaggccctgggtagagacgtagcacaggagcccttgacaggaatcattaatttgctcttttctccctggggctggagtaaaatgaagcttgttttccatttctacacaatgagaagaagtgtatcgatttttcctcacttctgattgttcacattaggggcttgtttctaaataattgacactacgatcattcgttttactgcacaaacatattttacgggtcacttttccctttgagccatagtcctgggtggacctgaaacaagtccattttgtagactggtgtttctctgcatggagaacatccctcaaagagcaggttcagctgctctggtggcccccttgcaattgtatttgttcacacattaatttgtccaaaagattgcactgagcgccagtgctgtgtggacagaatctaggcagtgggtgtgggctggggtagaggagcactagtgggtccttgcttgctgaagcaatcagtcgggcctgaagtgctagcctcagacggaagtgcttccttccatccaccttaggaagcagtaaggaaattcacgggctcaaggaaaagcaggaggaagagggagggacagagtcaaagcccccagctgtcaaggtcccctctcctagctttgctcatgtcacactgacttttcaaaggatgctgcccaatcatccataaccaatcatccttatgcttgaaaaatagcttagcccccctcaggcttctctgagtccccaaactggaaggacacctccctcctcagtccatctcccccagggtcagcatctgaacctcgttccttacgttctgatttgggtttcaacgtgagttccttgggatgtaatttctttgaggtcagaagccaccccttcctcaccgtctctccagcttccgcaggggagtttccagtgctgctacccatacagttggatcaccctcattccctggacttgtgaaatcccgagagaaggagctgggatggaaagtggtgaccaccactcccagccctgctctctgtttttctggacttctagtactgaccctccacgcccacccttgggttgatgtggtctctctaaggtcttctcagtgtgactctaggctaattttccttttttgaaagtggtgctgagaacagtaatttcttttcttgtatgggtgaccccttcatggacagttcagatttccaagctttggtgccacatcctgcaacccagtgaggaggagaagggaaggtccgggctgaaaggcttacagcttcccactgcccctgcagggtaggctccagtctggctgcctgtgagcccctgagcaactgggtcaaccttgtctgctcaggggagggttgctcctgattcttgcaggaggcctcagctggtgcaacagcagtggcaggttttggggggcatctcctatctcttcatatggccccagagagagagagacagagactcatgggactttcttatacaggctgaagccaggaatgctagttgcctccctaatatccattctcttctttgttcttcataacagagccccaattctatttcgtgtggcaatgggtctaactaaaggaccaagtgttccagcctctcttcagctagaggtgaccaacaggttgggagcagaagtggttgggtagagcttctgagaaagtgctttaacaaagggcaggcaatggtatgtgacttctgccccctcttttctctcctgtttttttttttaaattttgattttaattattttattctattttttgagacagagtctcactctgtcacccaggctggattgcagtagcatgatctctgctcactgcaagctctgcctcccgggttgaagcaattctcctgcctcagcctcccaagtagctgggactacaggcacccgccgccatgcccgtctaattttttgtatttttagtagagacagggtttcaccatgttagccaggatggtctcaacctcctgaccttgtgatccgcccacctcggcctcccaaagtgttgggattataggtgtgagccaccgcgcccggccttttctctcctgttagctttctgcctagaacacagacataatgactggagccccaaaagtcatcaggaagtgaccttgaggatgaaagccgtgttctaagggtgatagaacataaagatggaagatcctggcttctatttactacagaatattttcttctgtttatcccagggcttcttgtatataagagagaaaaaaaattattgccattttctgttacgagtttcttaatgcaactcctgatgtatcagactgtatagttatagctgttactgagaatacccaggtgttcaggagctgggtgacccacgcacaagtgatctaccagtcttttaaaattctattattaaaacccaaacatgctctttcatttccacagaacactgggtctaaatttagactggtgcatcctgatgctgcaccagtctgctcttaatttaaggcatacaggcatcttgctaatttgaggatagttatgtgactaagggagaaagtggcagatgtaaggggagcccaggctccaaagggaattttcccagaggctcctccaatacagatatccagagtaaagtagcaaacaacacgagctgaaggtacaacacaggctgaaggttccaggctcggccaagcagccaggtagtgcagctcagcagagctcattccactttgcagaggctgtgtgtgcatgtatgcaggctgactgtcagtattggtttgactggatgggttattaagttcaatgttgattctgactggtcagtgcctatgcctacactagttaactattctgaatatgacccctgcgtagtacaaggcttttaaaacctgacaacctccttgcttgatgatggactacttcatctccaggtccacccaaggactgtggaatgcactggagttcaacctgtatattcaaacaataaatgattaattctacacatgtgcaactctgtaatattgaaagaggaggtcagtgagtgtgcatattaaaggacaacagaggcctttcctctaagtggaccatcctcaaactctttttgttgttttcttcaattctctatctggttgtcttttgatcagtacagacataccttgaaggggaattaatcatattccagctgcacagccacctttttctgtgtgtcaaaaatgacaagctctttactttcaaacatagccaccattagatgctgttgtgttcttcaagcagtgttccgccttctgaaatagattcccactcagcacgggcaagtgccagctcctgggcctttgccagtctgctccctcccttagcagttaacctggaggtgctcagcctaccaggggcatgggatggctcccactacttgcggttgtaattcttcacctcactgtcatggtgcctagcttcctgggagctcaggacattattccctccctaagccctttgggaaggttgctcagggatctaaccaagggtgagttcaggcccccttaccactgcctattccctaaagtggttttggggcctgggtccttaggcgtccttttactagttcatcttgggtggaagtggaagtttccatcctttctaatactgagctgtgctgctcatcccttctgctccaccctggtcttacagatcctattcccttcaccccaccccagaggaggaatgcaattcaaggtcatatgataatgaggagaccttgggaattttcttcaagaggtagcagagattggagacctgtctatgtccatgagagtttaaagatattcctggaggacttcctattcaagatgctgcactgagcacattatattccctccttccactaaaatgacagtaaaggatacaatagtatagtcctctaacaaggtagacaatggggaggggcagtgaatgaggcattttaacagatttccagaagggaggaagtatatgaagaaatgctggttggaaagcagagtggagaaactcccagcttggaatacatgcaaaggggacatgcctagtggagcccagagaatgccacagacgtagagatgacaggtactttaggatggcctagaacgagagaatgaggctgaaaacaggaagaataatcgaagatgtgtacaaaaacagttgaccgtcacaaccctcactctctttcccaaaatgcagactagatgacagtccagaatttacccctaggacaaaacagaatgattatttcttaagaaattccataaatgtccgggaagaatttgggcagtgagcgtgagttggggtctgagagtaacgtcctctgccttctggcatttgaggggggaaagttttgtgtgattttgactttctgatcattcatgtggcatgaagccaccagtggccagtcctgcccttggatagagagctcctggtcagaacagttcatttataaacatgaatgaatggccatggatccccgaacatttgaggagaatctgaattaatcaagagacaaagtaaggtaaatgggacattggttgcagaagaaacaggatgatagggaacagaacttccaaaaaaactcctgtctctaaagcattcaccctgtccctgaacatatcagacttcctaagtggtcctgctgaaggtcctcacgcttggctcaaagtggaaaatttaaacatcttggtttggcatcttactaaatctatgctgtaatgtcccaaatggtagccattagccacttgtgcctatttaaatgtaaatttaaattaattaaaatgaagcaacaaatttagttcctcagttgcattagccactcacgtgctatttcaagtattcaatagctgcatgtggctagtttctactatattggacagtgcagatacagaagtttacatcaccaaagaaaattctattggacagtgttgatctatggcaataggttacagccgaaacttgcattttatcatcattacatagatttatacacatatacacacatcaatcacttcctcttttacaaattatttgtttttatatatttttaaatcgaagcataatttatatatagtaaaatgcacaaatcttaagtgtacaggtcgatgaatttttaatatgtatataccagcgtgactaccagtcaaattaatatatggaatatttccatcacttcaggatactccctcgtactcctttcagccagtattttgtctcaccctctcccatcatccccggggtaaccatgctctgaaatctatcaccatagattagttttgtctgtccttgaattcataaatgaggtcatacagtatatatcttttgcatctagttctttccctcagcataatgcttttgagattcattcatggtgtgcatacactgtgcatgtggtgtttgcactattttgttgctgagtcatgttccattgtataaatataccacaatttgtttatccattcacctgttgatggacatttgggttgtctccagtttttgcctataataaataaagatgctatgaacatttgtttttaagtttttttttttttttaggtttccatgcaagatcatgggcttcacaaaagcaagccaggggaggactttgggtccctggaagtccttgggaatgaaaagtgtgtcgctggacgccagggacgggaaataaaaaatgaagggtctactgtttacttgtctcttatgccctctggttcgtgaccaaccctcctttgagggtcccacacaatttagaagactacacgttcgatttcaggtgttgtcttgtcagagtcttctcgctgaaacccactctaggtaacagggaagaagggctgcagaagcagcatttttttttttttctgtgtgggtgaagtcacctgccttcctggcccctctccctgatgacgctcgccatgatggcagccgcagggcacgctcccagactccaggtgcttattagtctgttctcacactgctataaagaactgcccgatactgggtaatttataaaggaaggaggtttaattgactcacagttcagcatggctgaggagacctcaggaagctgacaatcacggcaggagtggaagcagacacgtccttcaaatggcggcaggagagaagaagtgctgagtaacggggaagccccttataaaaccatcagatctcgtgggaactcactcactatcgcgagacatgtgacggtatggggaaaaccaacccccgtgactcaattatctccacctggtcctgcccttgacacgtaggtattattacaattcaaggtgaaatttaagtggggacacagaaccgaacattttcagggtggtttccagagtcttcccagactcaacttcctgctgctcagcctgggggctctgacgatgccacccaccccatgaccccgaacttcatctgcacggcccctgccctagattaggccttgtcctttctcatccgacccgtgcatcagccttcttgatggtccagcaggcagggtacggtgatctttctaagacacaagtctgaccctgcccctttcttcattaaaatacttcagtggctccccattgcccacaggataaatctaagctcctcatcatggcctagaaagtctcctgtgccctggcccacagtctcctcatcagggccctttcatgtgattttcccacgtccacccctgactccagctagtgcagggggctgtcatagctctttgcctcaggtctggggcaaacaaaggaggccgttactataggtgtcaaaaacttataaccaaaattttaaatcaatatttaaaaaaatcaaaatgagtgccaaaaacccacaactaacgtaatatcagaatttcacgtaaagacaggctctgacagtgctgtgcagtgttatttggagcctgaggcaaggggaaaaggtgcatcctaacaaatgtgtttttatgtatttttaaagggttaatttaagtattgcaaaacagaaaagtagacgtatcaacactcacaacgttattttaagtttaaatattttatttttacccagaccagaatttattataatttcatgttcctggctttagtagaagcaagtgcatcagtcatattttcaaaatctagttttgggaaagggcagactttgagtctagcttcactatgggttcacatggtgctgatgcaatcgtgtcctctttacatggggtaccacttctcctgtctaggtggtgtagggtgctggtgaagaagaagatcttaaaactggaccaggcagggcacggtggctcacacctataaccccaacacttggggggttgaggtgggcagatcatttgaggccaggagtttgagaccagactgggcaatgtagtaaaacactgtctctacaaaaaatacaaaaattagctgggtgtggtggtgtgcacctgtagctccagctactcaggaggctgagatgggagaatcatctgagtctggaaggtggaggctgcagtgagccataatcatacaactgcaccccagcctgggtgacagagcaagaccctgtctcaaaacatacacacaaacaacaaatgacaaacaaaaccgggctacctcggttctaatcctggtaccattattcagctgctatgtgattcagggcaaattatttaacttctccctctgcatctcagtttcttcactggtggaaaagatataacagaagctccctattagggtggtcgtgaagagcaaatgagatagttcttgtaaagaacttagacaaatgtgaggtccagaataagttctcaaaacaataaaaaaaatccctagatacagtcttactcatccttcaagacccagcttaagcctgaggagctgcctctaactattctaggaagtcagcatttccccttttcctgggctccctcgaccctggagcttcccctggcatctccctgaccacatggcatagtcctcctgtgtttatcatctgtctcatccactgattgcgagcagccccaaggcagtaaccacaggacatcttctgcaaaaccagggctgaacttgctacgccagccggggtttccagaccatgcttggtgctcagctctggtcttgctctgctgagaatagagaagataaggtttctgccagaaagggcacagtctgggggaagagttgactgtcatgaagactggtgacccaaaattacaagtgagtttgaacttcagtcccccgctggctgggagaggagaaactaagggtcaggaaggctcggagtgttctagagggaaggtccagccctgccatggtgcaaaggccattggtgttttttgactctgtagaacaagtcatgctaaggagtcctgagcctctgagagtgaaccctggcatctgcacaacacctcaggccatatgtggggactgatgggatggggctagtcacccacattatgggtattctcatatcataaaagaagagggtgttcactgcttctatgtcaaggtttcccacaacctcatctgaggaagctaccacacaactggttctgcttctagcatctattctaggacccagcggctgcctctcctcttcctcccctgtatcagtcagattccaacagagagacaaaacgtcaggattcacaggcatacagatgtgcatgtgtatatgtatatgtatatgtagatacatatgtcatatgtatatgtatgtgcatatgtgtgcttctatggaattggtttatgcattttgggggatgggggctaggctggccatcaggaagggtagctggaactctcaggcagaacagaagcttctgtccacaggtagaatttcttcttcttcagggaagcatcagttctgctcttacggcttttgcctgattgaatcagttcctcccagagtatccaggatactgtactttacttaaagtcaactgattataaacgttaagtatatctacaaaataccctcatagcaacatctagattagtgttgatggaataactgggggctgtgccctagccaaattggcacatgaaactgaccgtcacattccccaaattcacttcttggatctatggaggaagaagaaaccaacttagtctctttgtgcgtatgtaaagcaagaagcaagaggaaaaagggattcccatgggttggaacccatatctctgatcaaaatggcttactgttggaggaggtgactactgactcccctcaatagctcgagcagagaccacactcctgctaaaccagtgtcagcatcctcagtctccacaagaacaagtgtctccttcaggtggtgggaaaaggttaggtggggcaaaaatgagagaaagcatccatttcctgggcaccaagcactgacagagaacagattctaaagaaacctcccccccagagcttgtccagtgagtgagatatccttctaacactcacatgtgggagctatcatgtcaccttcatccactttcttctctccactcaaccatccacccacctacccaaccatccacccacgcacccatccatccactcacatatccaaatatccactcttcacccacctatccacccttgcattatccatacttccacacatccacctgtccatacacccacatacccatgtgtctgccctttacccatctatcttccacctctgtatatccatgcacccacctactgatgcatctacacacctgccactcatctatctattcatctactcacctacctatttatccatctgccctcctatctgtccatctacccatctattcattcatacaacagatgtttactaaatgcctatcgtgatgcagccaccatacttggtgctgaaagtgcaatgacaagaaaaacagaaacagttccttccctgagggagcttactatctaggaggtagacattaacacaggcaaataccaaattgcaatggagaaaattgctgtaaaggagaggtacacagtgccatgaaaacctgtaatgggagatggaacctagtcagggaggcaaggaagacttctcagctgagatctagaagaagaggagtggacttggtgagagcaaagagagagagcgagagaaacaataagttcacagaatgagaggcagctggtgtggctggaatgctttccaggggagtgcagcccagggggagatgggaggtatggtaatggccatctgtccagggctgtgttgggaaactttactatttttcctcaaaacaatcaaatcattttagggaggaagtaaatgatcaaatctgagttttgaaaagattgattagggaggaggagaacggcgaggtgggaagacaatataggaggctggtatagttagctgtcctgtagagtgttttgttacaaatttggtattgaatttttgggacaaatattttttcttatgcaaatatcaaccacaaatattgtactgagagatacttgatgttctgtgaagtttgagtactaaaaacagaggtgttgaatgagggcattttccctggggagaagttctgcagggcatgctatgtctggtttttcatttgctctttgaggcagggattcattctcccatctcatcccagggctggtatagacacctgatgactgtggctaaccaagaaatgaatgaaagatttagaagtctgtatgggttccgggtctgtttgctctcagatctatcccctagctttctgtgccctgctctgtatggaagggggctgacttctgcaggcagcattcccagccttttgtcaatagcagccagtgggaggctctgatggaagagggaggtagtgggaagaagggagaaaccaggatatttctccctctttgtctgctttgggtggagtctccagtagctgctatacctcctttatagttgcagcttcttcagggtgaccctgggcccctcctgggcttctttctctgtcctgtggcctggagatggtagtggcttcctgctgttgctaacatctggttgcctcactgtcctcctgggcttctgagctttttcatcaatcatgtaaccaattccttgcattcaagtccctttgccttgaacaatctggtggtttctctttcctggttggattctgattaatgcaagactgagttgtgaatgtggcttccctgtcccgggacctttcctcagtttctgggaaattccccacctacataccagctgccttgagaaactcctttaaacacaaatgatgggggatgccattcgcagttaaaagaagatactgctccgtttctaaggaagaaaagtataaatgaacaagttaaggagagggagtaagacgagggagtaagttttgggggaagaagtaatgattacaataataacaactttcaattattagacctctgatatgtgcagatgccttgcatacattctcattaatcctacaaagagtcatattgttctcattttgcagttgagcaaattgaggctagtaaatggcagagctaaggcttgaacctctgatctcactccctccagaacctacgaccattctgtggtgcgcaccaagagagaaaaccttcccagagaaatattaatatttttattagttatacatgcacttatatatatatgcatatgcttaatatactgaacatatctattaataagccacaaagaatattattaaaccaggtcttgctactcagtatggaaatgtcaaatcttcaatatccaaatcactttgatgatgtctatgatgccaaatacccagacaagggttgaaacatcagccaacatcatcagcagccagtgtgacatccctggacacacagatgtcacactactcttactttaacaatgacataaaactgcatttccaggaggacctgcagcagtgaaatcccaggcttgattgtccaggagactatatcttcctcacagctcacagagcaaacaatgtaagaaccaaatcaattacaagaagaaagaggaggcatcaaaggaggaatagggttcttgccatgtgcatggtacaaaaaccaggtggcagaagccaaggaagtgaggcttatttaatccttccttcagggaactcagcatggaaggctttttgacaaatgtacagggcagaagaaagaatgcttatcaagaatgagttagggccaaacagaggccctaaggaagttgccatcgtccttttaaaaaactgttctttttttttttaggcggagtctcgctctgtagcccaggctggagtgcaggggcgcaatctctgctcactgcaagccccacctcctgggttcacgccattctcctgcctcagcttcccgagtaggtgggactacatgcacctgccaccacgcctggctaattttttgtatttttagtagatatggggtttcaccatgttagccaggatggtctcgatttcctgacctcgtgatccgcccacctcggcctcccaaagtgctgcgattacaggtgggagccaccacgcctggccaaaaaactgtttttatatattagttttcagagttttatttctccaggatcctcctagggttgtaacgatgacgtgcactttgtatatgaaggtagttatttcttcagcagtggtgagtggcttactcaatccttactgtttcttttctgataattcttgccttcaataaaccttcagtgggtttataggttaatccagggctaaggaacagcgaagaagcccttgggtactcacacggggtcagacttgcccctgggcccagtggccccacatcattgcagcctgcaagcctttgccaagctgtttcacctgcaagggaggctccccggctgctctccaaggctgtgctcatcacttcctctcattcctgactctgaattcaactgtcttaggaaggctttgggggcaaccctgtgcagtcttccttcaactccctaaggaccgagatacagggtttatatttggccatcatcgatttgcttccatctttgctttgtctccaaattgtcctacatactacttccagattttttttttttttctaaaacatagctcagaccctatcactagcaaatgcaaaggctccagtggccgcaaggatcatgggttgattattcttccctccttgagacacttttccctctttgtattcaggatacacactcatctatatatcctcttatctcaccaacggatccatcttaatcttctttgttggctcctcttcatctcccagactttgaaatgttggggtgccccagggctcagtccctgtccctcctctttatttccctgcctatgctcacactcttgatgatctcatccttcctggtgtcctaaaacaacatgtacttgttgaggacttccagatttctgcttctaactcagacatcttccctaatcctaggcttatatatccagttttcttggggaaaaaagttgaatgaatccagtctctccttcttttcttctttcattttcttcctttctctctctctttctttttctctttctttcttttctttctttctttctttctttctttctttctttctttctttctctttctttctttctttccttctttcttttcttttcttcctttcctttccctttgtttctctctctctctttctttctttctttctttctttctttctttctttctttctttctttcttctttcctttcttcttttttgacagggtatcattctgttgctcaggctggagtgcagtggtgcaatctcagttccctgcagcctcaaactcccagcctcaagcaattttcccacctcagcttccaaagtagctgcaactataggagtgcaccactacatcaggctaattttcttgatttttttttttttttgtagagatcaggtcatgttgcccaggctggtatagaactcctgggttcaagcagtcctcctgccttggcctcccaaagtgctgggattacaggagtgagctaccaggcccagcctttcatgattttcttacagtgtatccttgacattcctcccctgtgggatctatgttctttccccttgaagatgggaagacctccgtgactgttgtgacggatagagtatggctgaagtgatgctatgtcatttccaaggctcgatcatcaatatgccatgcagttctgtcccgctgtcttgagatgctcactcttggaagctagccaccatgctatgaggaagcccaaatgaggccacgtgaagacaccatatggagaggccacttgtgagtattctggccagcagcccagccgagttccagttgatagccagcttcagccactggacatgggaataaagacacctccagatgatcctagcctctagccattgagttaccctcaactgacacatcttcccagctgaagccccagacattgagagaagcgtcagattgtccctgctgtgccctgtctgaatttttgactcgtagagtccatgagcagaataaaatgattgacacaaagtttcaggggttgttatgcagcagtagtaactgtcgtactaggccttccttcggcctgtgtctaccctccagtttcagactcagggaggcctgccccctcctctacagctc[131 bp omitted]actgcagcctctacctcctaggttcaagtgattctctgcctcagcctcccgagtagctgggattacaggcctgtgccaccatgcccagctaatttttgtatttttagtagaaacggggtttcaccatgttggccaggcaggtctcgaactcctgacctcaagtgattcacctgcctcagcctcctgaagtgctggaattacaggcgtaagccacagcgccccacccctaactgtgtattcttatactgacccactcctctcaccccaactaccttacttcagcctatcagaggagccagaccagacaccatgcacccattctcaagccaccctgaggttagactcaaacactagggactgtttcatgtccatgtgcctttgcaggtgtagcttttcttgtctggccacattttattttttcctcacctcttaacttctcaacctggagaactcctactcacccttcaatgcccaacctaaatgtttcttccctgtaaaaaagactccagaaggctccggattcagatgcttatggagtgaagtcagagctggatgtaggtgtgggagaccctgtgtccatccatgggggctgttgctacctggccccagataattctcgcctccctggaccgtggactcaatgtggatagatcttctgatttttcaagacaaggctgagtttttatataaagtctcctgattttaaaacctttaagtaggccggtcaagccaggttgcttctggcctggggccaccagcttgccatccctgccttaaatccctgttaggcacctctcacctggacacatcccacacagtgtttctagagagctttccagactctatagaaaggattttataaactgggcacatagctgtgaactccccaagggcaaggttggcccctgtgttcaccacctttgtaaccccagggcttagcataggactggatgcatgacaggctgaagaggctgtttgttcagtcagtaccaaggtctccgcagccctggtctctgacatgagggtttagatgctgccctccacattttccccacagtgtcagcccgaactggctctgagccctgcctccttcctcacgaggttgcccctctcatcttctccaggctacgtgcctccgaatcagctctccacactctgaaagcttcccctttcccatctccccactacactcctgtttggagcctgagctagtcaaaagcccttctgattcaagtgtgtaaatctactcagagatgcgtgcctctccaagcctgttgttttagctgaagcaggatgcttacagctgattattgcattactgcggagctgatgtgcagtgcagatccacaagttagattgcacaatactgagaaaattagtgcttcagaagaagttgtctgcagcgtaatggatgctccgtcatcaacagtgttccaatattctctccggagaagctaacgacgctgacaaaatacattgaactgctgttctcttccacacattcaaataaaaggcagtgtatcttgatgcagggcacatcagtgggtgatggcaaaacattattttttctttatgaataatagaagacatttggcttgctcataatcttttaaaaaccgtagtcatagtaacatgtgtcttgcccattaatatgagattttttttcttcttaaagacaacagcctgttttacagtgtgttcttagtcccccaacagagcagtatccattcgatttgcaacttgaccgaagccagttataaaaaggaaagattgtctctgccaccagcgagattcttagctattacccctgtggggtgacagaagagctagattcattttggtcaaaaattgtagtttagaacaaaagagcaaagtctctgatgaaaagaatgatcagtgattgtgcccaagttgggggaatggtctgcctacatgtgctcttttccaaaggaaagaactcaagtttcaggagaagtgaccaaaatagaaaaataattccaagtgtgcccaaacccaaggggtccttgcctctagcatcaaggtggccccgaccggtgcttgtggtggttacataaaggggtattacataaacatggggcacgtgttctgtttttgtaattgatgcacttcaataggggaatgggaatttcgtaaaagcaagcaggaaaatgtggatgttccatattagaaggttgaagaaagtgaagttgattagattggagagggcagcagatggctctcaggagacacgatgaccagttttaaatatctgagagtctattgggggtgaagggatttgacttgttttgtgtgtccctgagggaaagaactgatggctatgaatgagaggacaccattagggaggcatatttcgggtgagtgtaaggaagagctttctcctcattgttgctgtccagataaaggatagaaggcatgagtacttatggtgccttgggtcaggttccctggcacatagctctgagatgaatctccaaatgcacaaagtttatcaggaagtgcctccatgatcaatatctggtaaaggaagcatgactaggcagaggaaggagttgagctatgacaaaactgcaaaagagcttcagctactcccctggggagccctggagtggaggcggccctttggcatggtcctgaattgaggctggagagtcagccctttggaacctttcactgaccaatcatcggatgcagctgtcccccagggaagtaggaggagggattgtggatgaggctgctcttcagtagagggcaattccaggagagcaactcagctgggagtcatcagccaccaacatttccaggagctggagggatgagtgcctttgtcctaaaggaggatctgggcagcatcccacagcatccattagagatggctgcttaatggagatgctgtgacaccctgccccttgtgtgacttctcatgatccagtgttcacattctctaacgaaataccataaagtccagataagactcagtttattgactgtttccccatggggcctccagtgtggatcctggatggagtcagaggcacatctcccttagtttctagcttaaagctcttggctcctgggcagcatccgaccaatactccttggttccaggaagaagagttcattcattcaaatttcattcagtaatattaattgagtgccttcttttaggagttagaaatacaactatgaagaagataaagtcctatgcctgctgggacttatattctcgtgggagagctagaaaacaatacacaaataaaataatcctggtaaggagaggtggagtgatcatgtgtgtatgtgatgtttgtattgggaattcagggaaggcctccttggggagtgacactgcagcagatttgaatgatatgaagtagtgatgtctgaagatctggggaatagggttccaggcaagaggaacagcaagtgtgaaagtcttgaggtaaggacagccttggtgttttcatgcttcttttaactaagtagagtatgggaagatgaacctcagtttttagggagaacctgccttagtaaagaggcagctgcattaggggatgtaaaaggcattttcgatgttagtagccaaaaaccacgcatggttctcaggagagaagaccccagttctgttgcagagtgcttccttggcagtggaaacccagctgacatgatttgtttcctcatttgaaaaatcaagatgattttagtacccactctgtagggctgttgtgaggatcaaagactgtgatgtgtggaggtacttaacttagagcctggctcataataagtgcttgatacatgttagcttttatttgtgctgtataactcaagagagctaaagagctggggcttgaatctagggtttaaattctatcaaagtccttgttctatgcaatgttgctgtttctttctctcttagtttgagtctctgtatgtctgcttgtgtgtctttctttgtgtctatctctatgactcctgtactccatctctgcttatctgtctgtctctgttcttcactcctctctctctctctccctctctggctttcactctgtctgttcttcctttctctgttctctctctctgcttcctttcttcctaccagactgagagccccactgtcttctataggcccaagagcaggcaactctccacggtgctgacgaggtgtgtaggtcccagacttccatctctcattagggaacagaaatggatggcagtgattttcctccagcagccagtcagcagggactctccatctgctagtgcaggtagagcaacttcccttaatgggaccagcttccctagagcatgtagaaccttcttggtcatgagagcagctgtctttctgcccccttcccacaaacacacttaatcttgccttgtacatgcccatatggcctccacgggggctggagaagcaggctcttgctggtctctggactgtagcaaagcagattggaaggggtttatttctcctgctctagtggcatatagcagctccccagtgagggagctgggggatggcccctctggagacacaggcactttctccatggaaacccttgtcaaggagaatggtagcaaaatgcggtgccactttatccctcaaagaagctttctttaatatcacttaaagtgaattaaatgatgagggccttgagatttcatctctcctgatccctttcagcaggtgaaggacggcagcagggagggctcagggcttggggaaatggggaaggtgctctgaggaggtgaaatgtcacagaacttaaagcagccaggcacacgtttcagacctgaccccatcactaactctgtgtcatcttgggcaaaggattgatcagtttcctcacccaaagccgggggcaaacatatctgctccagcttcctcatagagttgttctgaggatcaaacagcaaatgggatgacagaatctggaaactaggtgtagtgcacattccaacagctcatgttttttgagtgctttttaaggccaggctctgtgcgaggtattctgtgtgcatcatctcatggaatccttaatcctcataaggtagataacactattattgtctcacttaagggacaggaaaatttaggcctcagaggagtgatgtgtctttatctactctgtgtgtgtgcatgtgtgtgtgcgtgtgtgtgtgtgtgtgtgtgtgtgagagagagagagagagagagagagagagtgcttggaaattaactctggtctctttgactccgaagttcttctctcttcctttgtgctccacccccatctctgtcttgcaggacaagctgtggctgatgtccctgcagcccagtggtcctgacggactgatggagacacaggcagattggtcctgacggactgacggagacacaggcagatggcagggctcgagttgtcagacacatcctgagttgtccaagaggctcaccttgaacacacctgcagacacttggggaaacaggatatttttgagatttttatcttagagaagggactttctgctttctgctctttaagattaatgacctccagaatctgtgacttttgggcagcagaggttcaggagaccaagtgtctgctgctttattcatccagtgagagcagaactgggcttctcagggtccaagaggcccatctcattggcaacaagagcccagcctgaggattttacaaatagttggagctctctctctctgccttcttgtatctgcagcctcaacttttagctccaagccacgttcatcaattgatggcccttgtttctgttttgacgaaacgaaatttgcttttaaaatcctgggttcagaactctaagcacagcccttctgggaggcataaataagttggatttaagagagactaatcagggaacaattctgaagtgaaccgagtttctacaactagactctccagcttcattaagagtgaatttggtcaccttttgtatttttgaataaaaataggctaagcccctcacttgccatattttaaaaaatctcaggaaatttcttggggcttttagattattttaaaaaaccccttagtgtgcactcagtcctaagtggtcagtccggtttccatatgctcatgctggtaaaactgggaaatatgtctagtccaccagtaggcaggctggcttcagctgccatcaatgctgctgccgccacatgggatggttgttgaaaactgatccagcacaacgtggtcccctcttatccctggctgtgaggatgtgcttgctggctcacatccttgcactgaccatgttgctattttttaaaatttattatttatttattttttgagatggagtctcgctctgttgtccaggctggagtgcagtggtgcgatcttggctcactgcaacctcttcctcccagattcaagtgattctcctgcctc[133 bp omitted]tcggcctcccaaagtgctgggattacaagcatgagccactgctccagacccaagctgccactggaggacagggattctatttcctcagtgttacacttggcacagggtgctgcacactgggattcctaaaccaatagcttccttgttcatgagtatattcccagccacgccctgtcatgtgatggagcagccacgggggttctgccggcctcagcatgcatggcctcaagaccaactctctttgagattagcttgggtcccttctccagatttcccctccctttagggtgagtctcagcctcccagagggatcttttcctgctgatagttctcaatcgggatcctcacagtgccccagcaattccaataggtttgaacttaacaatggcagagggcaacattggcatatttgctgagaagctgccagaggactcaatctcctccttctggtaccacttctgcgttccaaggagtatcagcaggagcagccaataggttggctaggaaaatgtccagttgcagccctcccttgcgaggcactagggggctatttgtcattttacgtaaggaccagatgaggttttctagaacaattcatctatggaataaactagctgcaacatttaaatggcagcttataaattccctataaaggtttaaattctgcctaaccaggtatctctttgtatttataagacccaaagaagaggctttggaacttcatcttcttgctctgacaagttcagaactggggacccaagtctttgtttctttattttttcttttttcttttctttttttttttttttgagatggagtttgctcttgttgcccaggcttgagtgcaatggtgtgatcttggctcacggcaacctccgcctcccaggttcaagtgattctcctgcctcagccttttagtagagacagggtttca[131 bp omitted]agctttgggcttggtttctcctcaagttctggtgaatagctcagtcctcacacctccttcctggaaggaatgccttgcttagattttgcctgtttcccatgtgattggccctggccttgatggggaactggagattctctccccgctttttaacattctaaaataacatttttttttaaaaataattctggatttgcataaagtcacaaagatagagagtttctgtattttcttcatccagcttcctctgatgttaacatgttacataaccatggtacttatgtcaaaactaagaaattaactttggtacaacactactaactaaactagagactttcttcagatttcaccagtctttctactcatgccccctttctgtttgagagtctattgtaggtaccacattatatgcagccagcactggaatccacctggcctagggacagctgcatgacccagtgaagtccacacctagtctcacatcatgtcttggaagcaggaaaggtgaagggctatgtcaacttagctcagctagagctacagttctcagaactccctttctgtcatgcttccagtttcagggtggccccaagagaaatttgcacaggattcgggaaacagaaacgaagcaccagctgttactctcggaaagtcagtgaaaggcaccaggcagtgtcacagtttacacacaatgtctctcaactgctagctcacctttctggtggggagctggtatgggaaacacctgagctgtagctcctccagttccttctgggtctcctccttcaatttttccaggtcttgggccaggtatgtggtcatctctgcaataaaggatgccagcttctccttcaagtcacctgtgtcaacaagattggaggcagtgaggaacagacataggttctgattgtccttatgggatccagtcactaatgttctggtaactgtttagcaaccagctcaccaggtatagtttcaacatgaatgtcagttgatatttttgtttaagcaaataaacattctatgtaggaagcctctgctttcatcactgtgctccagagttcagtgtaagacttggcatagaataggcaatgtgtgaatgaatgaatgagtgagcaagtgctcacaaaggacaggccttccactctgactggttgctactaggattcgtggctatgttccatacatgctgagatactctagtggttcctgcaagtttactcacctgacaccttctcaaccctgctgctgggacagcccctcagtgcccttcttagatgaatcctgactctatcactctggctgtcacaccaggctgggaatagtggtccaagccctggttctgcatgctgccattccgcgtccgcaggaagcatgtgcacatttatgttgatgtgtgtaatttaggagcagcttggaagacggctgtgtgcttgcattattgagaaatggaaacaaacttctggagcctactacaggggtggccagcatcctttctggactcaagaaatccctttatttctgtatcagtcagggtttgaacatagaagcagaaacatattgagtttcacagaataagggatgttttataggaactacaagtgatataattgtaggagcaggttcatacctctgtgtaaggttgctgcttctgtgtctgatgttgtgcctgatgtcgctatagttcagcaaaactggctgctagaaaggaaggctggatgtgaacttggggagagcaaacacaagctggaaaccatgaagacacttcaaccagagctggcttgtaccaacttgcaagagctgattattaaatttttaggaattttgtgatcaagctgttaagcacagccattattaaaaaattaaaaagctgggtgtggtggcttccagtactctgggaggctgaggtgggtggatcacttgaggtcaggagtttgagactagcctggccaacatggtggaaccctatctctactaaaaatgcaaaaattagccaggcgtggtggcagccatctgtcatccctggtacttgggaggctgaggcatgagaatcacttgaacctgtggttcaaggtggaggttgcagttagccaagattgtgccactgcactccagcctgggcaacagagcgagactctgtcttaaaaaaaaattaaactatataaagatccaattaaataaattacattaaaacaaatgtaatagtcaagactcattccttcctaatcattttgcaatgtcttgttattacctatgcccttgaggttattcatgtctattacatctgtatgttggaaatgccatacaatgttcaatgatatcatgttgacagctttaacgtagccccagagagagttatttacaccacagagactggcaaacactatagatcagagcttgatttatgattttgctgattatctagacttaagaaggcgatgaagaaaatgttaataaagcaaattaaacttaaaaatttgacccatttgtagcagttacattgtgaatataggaaatagtcttttggcattcagaactatttttcaatttagcaaagaagtagcttacaacattgatgaacaagtgaagtgctaacatacatcttcattgtttcacttttgtcttgcttattcacataacaaaaataccaactgacattcttgttgaaactatacctcgtgagctggttgctaaacagttaccagaacattattgacaggatcccataaggacaatcagaacctatgtctgttcctcactgcctccaatcatgttgacacaggtgacttgaaggagaagctggcatcctttattgcagagctgaccatatacctggcccaagacctggaaaaattgaaggaggagacccagaaggaactggaggagctacagctcaggtgtttcccataccagctccccaccagaaaggtgagctagcagttgagagacattgtgtgtaaactgtgacattgcctggtgcttttcactgaccttctgagagtaatggctggtgcttcatttctgcttcccaaatcctgtgcaaatttctcttagggccaccctgaaaccggaagcatgacagaaagggagttctgagaactgtagctctagctgaactaggttgacatagcccttcacctttcctgcctccaggacatgatgtgaggctgggtgtggacttcactgggtcatgggtgtggacttcactgggtcatgcagctgaaagggagttctgagaaccatagctctagctgagctaagttgacatagcacttcacctttcctgcctccaagacgtgatgtgagactggatgtggacttcactgggtcatgcagctgtctctaggcctggtgggttccagtgctagctgctgtctctctgtaggtgggtgttcagatgggtgtatgcatacatcagtcagccagggcttagggatgggcctcctgtgccaacactttgcctttgccatcaatccagaacctggagatgggctttctggcactgggcttctgcatgaagaagtgggatgatatctcatactaaggggtacctaaattagtcttttttgggacaccccataggcatgacaaagtgtctgagctgaagcagtgaaggggaaggaaaatccaggaataacttccttcatggagagatccagaatcagcaagtgcagtcttccttgatgggccagctgagtaccactggtaagggcagaagtgggtgtgcggttcatggaggtacagtcacccatcccccccatcaattggatatgagcaccaattggctgtgagcaccttggcctcccctcaacagctggatgtgagcaggctctctgactcctcccgatgggctggctctcggcttgtttgccagcacctgccaaggtttctgtgggtcctgccagctttgccaaactggaggttgtcagattcagggcagtcaaggacaaggtcttcatttgtttggctgtgagctcagtcagatggaccaatatctgctccagtgtctgagctgggggctgagctgagtggcttcagttaagcatgaccttgcccagctggtctccttaccggcgtctgagccaggcaggcaagggtgggtgagatagttcctgaggaaggggccctggaaagggctgaaaaggaggcaggaagggtcagccaaccaacatgaccatatctcaggtgtgtctcactctcttcctcattgatgtaactagaaacgcctcccattgctgggtcattcctcctcgtgtcacacatcaagcgatgacaagggttacgcatgcccatgccacttgccgcatggcaggtacttcttcaccagcatggctgcataaattggtcaaagcagggctgctggagacgtgggcagagctgcttctctcagaccacacactctggcacctgccacctgcttcatgacctgtgtctctggatgacttggctttcaatcatctgctgcagtcctcctgtgatgaccctttgctctcaggttccaataacaattttttgtccctgctgggctctgggcttgttgtctagggctttctcagtgcacaaaccttcagtggagcactctgggccaggctaccggcactccctgtcttgcttggctttggcactggaggacggccattagaatacaaagacctttcctacaaaccctggtgcttctgtctgaccaagttgaccttctcactagggccagcaggggctaattcctcacacaatggtggaggcaagtagggggtgaataccctttaagaaggcaaagaacattttttttttaaatgtacagctgctttgggctgcaatactgcctgcaatttccttccttcactccttctctcctcctgtcatcatctctccttttctctgtgaatgagtcatggtgagattggcatgctatgagatggtattacagtcagaggacccaggagcttcattctgtccttaaagttcccaaggccatctgaaggctcattcgctcatatgtctgtggttgctgctggatgttggttggggtgctcactttctctccgtgtgctctctctgtgtgggctagtttgagcttcctcatagcaaaatgattggcttctgcagagcaagactccctaaaacagtgtgacccaggtggaagtgccgtgttttctatgacctagccttggaaggtgcataacatcacttctgctgagctctattggttggggcgatcccaagcctgaccagtttcatggagagggagcaaagatcccacttctcagtgggaggaatgttgaagtcacattgcatgagaggcatgtaacatgagagatattgctgcatcatataggaaaataccatctgccacagaggcaaaggaatcttttcaaaaatagctgaggttttgatgctcaaatcttgatgtggaattcaagtggactggttgcaccctgtgaacagcttctttcttctacacttcttaagcctaaacagctttaggaccaagaccaggaggttcacacttttctgtttcacctcttactgctcaaacccaaatcttaaatcttattgttgcaatgcaaggaaaagccaacacgagggggaatggatctagggaggaagagaaagagcattttctcaggctgggtgcagtggctcacatctgtaatgccagcactttaggaggccgaggcaggcagatcacctgaggtcgggagttcaagaccagcctggccaacatggcaaaaccccgtctctactaaaaatacaaaaattagctgggtgcagtggcaggtgcctttaatcccagttacctgggaggctgagacagaattgcttcaacctgggaggtggaggttgcagtgagctgagattgcgccactgcactctgacctggatgacagagtaagactccgtcttgggggggaaaaaaaaagcattttccctaaggcctagggcataattgtccctagctgtcctccccctgcccttccagacctagacagtgtccctgggactggctacttgtaattcttggggttctccagaggacaaaagtcaagatttatgataaggaattggctttggtgattatggatgctgacaagtcccaaggtcttcagggtgagttggcaagctggaaacctgggagagctgaagaagtggctccagttcaagttcgaagacctgagaaccaggagagaaccgggagagccaatggtgtagctccagtctgaaggctggaaagctcaaggcccaggaggagctgatgcttgagtttgtgtccaaagatagagaaagctccagttggaaggcagtctggtaggaggaatcctctcttaattggaggagggtcacccttttggtttattcaggcccacctggctggatgagccccacccactgtagagagggaaatctgcagtactcagtgtatagatgtaaatgttaatgtcattaacagaaacacccagaatagtgtttgatcaaatatctgggcacaccgtggcctagcatggcccagtcaaattgacgcataaaattagctgtcacgttacagtgtaggagagaggggttaaagagcagaagcaagctggccaccatgaaagagaagcttttccatccactgaaaattctgcccctacaaacatcagtccaaccagtgtcctgaaatccaactaaccaggccgtgcctcttcctccttacagaatgaacatccttcttcttcacccttgattcccattcatccttgtggggagagaaggatgaagaaagaggagctttaggtcttctgcaagtcagactccattcattcactgagtactgagccaggccacctgccaggcactgggaccatgagatgaatcttaccagtccctgccttcaaggaactcacaacctatagaggaagagcggacaggctgggaagtaggaggagatagtggcctccaggctcctccatccagacaggtgatgttaccccaccatactgctccagaaacagcagtggctccccacaacacgcccagctcatttgcacagagcattaagtttctcacgtcggctcctagcctcctaactactcacaggtgtccctccacctgtcctgtgctcccctgttttgctctgtcctctaaggcctgacatgctgatgtgtccccgcagcctagcacgtcacctcagctcttctccctactgaagtcctctcattcttccagtgtggcctctggcatgagacccccaagttcatggcaaagcactcaccctcttcatggttcactcccacatcctatggcttatagttttcttttcttttcttttcttttcttttcttttcttttcttttcttttcttttttctttccctttccctttcctttttcccttcccttcccctcttctcttctctttttttcttttcttttcttttcttatcttttctgagatggagtcttgctctgtcgcccaggctggagtgcaatggcatgatcttggctcactacaacctccgcctcctgggttcaagttattctcccacttcagcctcctgagtagctgggattacagtcgggcgccaccaagaccggctaatttttgtatttttgtagagatggggtatctc[131 bp omitted]catgtctgttgatggatgtgtgcagaggacaaagcaggtgtcaggcactgtgccaagcactttatggcatcacctccattccatcctttcacaagccctgggagcaggtgtttccatgacctttttatagatgggaaatggaagcttggaaaggttcaccataatgttaccagtggcacacaggtagtaagtggcagagctggaattaaaaaaaattttaatgggtacataataattgtacatatttatggagtacatgtgatattttgattcatgcataccatttgtaacgatcaaatcagggtatttgggctctgcatcaccttaaacatttattatttctttgtgttgggaacattccaaatccactcctctagctgttttgaaatatacagtaagttattgttaactatagtgacgctgctgtagtgttgaacactagatattgtccttctatccagcagtgttttcccattacaaacccctctttatccaccatccccactccttttccgagcttctggtaactattattctactctctacctccaggggatcaattttttttttaatctctcacatatgagtaagatttgaatttcagcgagggctgctcttaacctctaagatctatggcctgcctatttggcataaggcggggagcataaatgcaggttccctggactaagacctgagagtgggtgagttggggatcctgtggggctgtgtgcaggtggctgtttttcaaggggtggtaggatggtagctctctggactgcagggtcctcagagagggctgggtcctgctggggcacaataaaccagaaggctgctcagctgaacagtaaacagggccttccccagctatggaaagaaaccaggcctggcattggcagtgaaaatggctcctgggcacaactcccacctcctcagcctcagactggaaggctgtcagctttgcttgtctcatctgactgaatgacagcaatgtgtaggagtcgggaaagcaggggatcccttaatagatcggacgcctctcagccctgaggctccagctccactttttgggcagacagcatcagtgcataaaacttcatcagcctctgcagggccgggactggggcgaggcaagtgcaagtgaggcacccacaaaatttaagggggcaccaaacaactcggtaatgaagataagcagtattttaatgatatctgaaaaccccaattaatacaaaatactcatgatgaaataatagcaacattttaaatcaaggcaggatcaataggacagaaggcttttatgaattctgaggcacagctatgtggtctaatgaacaggtgagctggcctcccaaagctctgagcctccagggaactatgacattctgctgtgtttgtccttgaccccatggaaccaaactgcatttcatttatttatttatttatttagtcagtcactcactcagtccctgagtgcctattaagttttattattattatttttttgaaacggagcctcgcactgtcgcccaggcttgagtgcagtggcgtgatctcagctcactacaacctccacctcctgggttcaagtgattctcctgcctcagcctcccgagtagctgggattacaggagctggccattgtgcctggctaatttttatatttttagtagagatgggggtttcaccatcttggccaggctggtctcgaactcctgaccttgtgatccgcctgcctcagcttcccaaagtgctgggattacaggtgtgagccaccgtgcccggccctactaagcatttttagtgcagataagcctatcatttgaaaagaatgacaaatttgtatttaatagctttctttccagttctttttacagtttaaattttaattaattgattaatttttataaaatccagatcctgtgcaatctttccagtccttactctctagcacactagctagacttccagtacaatttttaatagtgctgtcaatagcagacatccttgtctttttcctgatttaattgggaagcagcctaaatttttattattaactataatgtttactggacatttttgatacctatgctttatttggtgtggaaatgacattct[144 bp omitted]ccttctgagtagctgggactacaggcgcccgccaccacgcccggctaatatttttgtatttttagtagagacggt[145 bp omitted]aatgttattgagtggttttggtgtatcttttgaaatgatcatataatttttctccataatctgttaatatgttgaattaggtcaaaatatttcctaattttgagctaccttcgcatttctggaaggtatttggacataattatattttttggacataattatattttgcatactgctggagaggatttgccactattttctttaagatttttgtatctctgttaataaacttaaaagtctgattttactgttttatactgtccttgtccagtttggtagcaagaacatactagccttataaaatgagaagcgttatccaccctacaccccccaattctctgaataagcttttgtaaaataagaattacttgtttttgagggtttggtaaaacttgcttctgtaactgtctgggcttggtgtctttggaaagggagatattttctttcttctttttctttctttctttcttttttttttttttttgagacagagtctcactctgttgccaaggctggagtgcagtggtgcaatcttggctcactgcaacctccgcttcctgggttcaagcgattctcctgcctcagcctcctgagtagctagaattacaggcacgcgccaccatgcctggctaatttttgtatttttagtagagatggggtttcatcatgtttgccagactggtctcaaactcccaatctcaagtgatctgcccgcctcagcctccccaaactgctgggattacaggcgtgagccgctgtgcctggccccattatattttcttgacgttattggtttatttaagttttttatgtatcttccagttagtttttaggatttatgttgttacagaaaattgttcatgtctcattgacttgaagttcatatttttcttgtgtggtttcaagtatttattgtatcctttttccttgtttgaggtttgtctatattgttgatcttttaaagagtctgtttttggtcaatcctctctaagactttctccctttcattaatttctgctcccatttttattatttcttttattctaccctgattttcttttcctagcttcttcagttgaacaaggaactcatttatttttaatctttcttcatttttaataaatacattgaaggctaaatttttcctctaggcagagctttaatcatgtcctgcagattttgcatcaagcatagtgattgtcatttagcgctaaatatttcataagttttcattgtgaatttcttttttaacccatgttatttgggagcatattttttcttctccaaatgcatcttaaactactttcattgttgaattgtaatacaaatgaattggttggagaacatagtctgtgtgacacggattctttcaaatttgttggtactgtcttcgtgacccagtgcattgtcgatgtttataacatgctttgcgtgtctgaaacgaattaatattccatgcttattgggaggaagattccagatttatctattacatcaagacttttaattatgtggttcgaataatcaatatccttactgcttgatttatttgtctctggggaggtacactaaactcttcctctgtgattgggtatttgtcaatatttccttggaactctaccagtttttgctttatatatttaagacaggatatttagactcacaggagtttatgattgttctgtctctttggtggactgtgttcctttttatcattatgtttaataataatgcctcattatttctcttatagctttttgcctccaattctggctacattagcattgcttaaatattcgctaaggatgggttcttttttgtccctttatttcaaagtttctctgtcacatgtaagtaacatatagttttttaaaaaattcaatcggatcatctattctttaccagattattttggtctatttacattttttggttcttattagtgtattaggcctaccattttctttttctttttttttttttgagatggaatctcactctgtcgcccaggctggagtgcagtggcgtgatctcggctcaatgcaacctccgcctcccaggttcaagcaattctcctgcctcagcctcctgagtagttgggattacaggcacccgccaccacgcccagctaatttttgtatttttagtagagacggggtttcccca[139 bp omitted]tgctgttagattgataaagttttattttttccatttctcctgctgactcagagactatacattatattagtcttcttttagcaatgagatgtgtatttttagcatttctatttttaagaaattctatttttatttctatttataagaaaactattaagttttttaaataaagtcaaaggttattcattatttatattctccttcaggtaagactttagcatactttacccatagaacctttgaatctttcatgtacaataaaaccttgaatctttctcattattgctgtccagacttttgttctagacattattattgtttggtaattatatagtaataaaagagcactacttagtaatttattaaatttattaacattttaccagtttctgagtttacctttgtttcttgcatgacacttttcctctggattcacttttctttttgctaaagtacattctttgccaattctttcagttagtttccctggatggcaaacagttttatgtctgaaaatgtcttattttcactttcagtcttgaatgacagtttagttgaggatattattctaggcttccagttacttgaattaattaattaattaattattatttttttagagatagggtctggttcttttacctgggctggagtggagtgtcacaaacatggttcactgcatcctcgacctcctgggttccagcagttctcctgcctcagcctccaagtagccaggactgcaggcatgtgccaccactcccagctggttttgtatttttggtagagatggggtttcactgtgttgcccaggctggtcttgaactcctgagctcaggaaatccacctgcctcggcctcctaaagtgctgggattatgggcatgagccgctgagccctgccggcttccagttatttttgctcagccttttgaagatacgacttcattgccttctatcctctattgtagtctgagaaacttacagtcattagattgttttgttttgcagctaatctgtctgatttttctttatctgatagttttttaaaataactttttctttaccctgatattctatagattcactgtggtatataaataggtgtagttttaagacatttattctatttagtatacgtctttgaggatgcacatttttcttcaattctggaaaatcctcagcccttacctctttggaaattccttcctcatagcccccctctattatcttctggagctattatttcaacacatatttgagccagagttttttttttttttgtttaatagctctttcctatttttctttatttctttaggctgtgttcttagtgattaaattagcaccatcatccaatgtacttattctctctttgactttattctctagcattgattccttcttttattctctagcattgattccttctattgaaaagtattgtaaatgaaatgcctattttgtgttcagcattttacatctgtttctttttttaaatgtccaccctaccttgttatatttttgcttgcttttgtttcacaatttctcattgttattagtcatgctatttcttcctttatccattgtggatcttaaataataaaaaatattttctgattgctttattattttactttcccgggctgcatcaaccttctgagtatggttttgtcagctgtttttcttagcattagatttcctcatatgcttcagaacttagctttgtaggataattatgtatgattactatgggaatccactcaactccctcaacccccaattcaacttttgtggtcatctccaacccagtcatgaggcttctgtccaaggactggtctcatgttggtggttggggctctggttctttaaggagacagaggaagatgcagatccaagaacttggctggtttgcctataggtcctggctggaaggctgcacatccccactcctaccttcgtcatcactgagctacatataaaccacaaccctgggccagatacattgcagttggtttcaaactccttccctgaccagggaaatcctatcccaggcccagtaagtctggatcaatatccctacatttttagttccttgtaccccacaggatagagctccagccaccccacaagatagagctccagccacctcttcctgcatcttggccccagtccagcagacctgcaattcagtcagcttttttctttgttcttttctaccatttctagtccagaaaaatacttatcttacttttgaaggtggctatgtcttcttagcttttgttgttaatattttatctatgagtgctacgtgttgggatcagagggagagcttgaagtatgaacttacagtatcatcttggctgggaggctccattagtgttcaaaccatttgtagttaaaaataatattgttgtggccaggtgtggtggcttacatctgtaatcccagcactttgggtggccgaggcaggtggatcacctgaggtcaggagtttgagaccagcctggctaacatggcaaaacctcgtctctactaaaaatacaaaaattagctgggactggtcgcacgtgcttgttgtcccagctacttgggaggctgaggcaggagaatcgcttgaacctgggaggcggaggttgcagcgagctgagattgcaccactgcaccccagcctgggtgacagaacgagactctgtctcaaaaaaaaaaaattgttacttacaacctaaaacatcataactgacagaagtacttatctcataagattgttctgaggacaaagtgggattttccaatgtgaacactctgaatggtgtctgacattgagaaaggctcaataaaaggcagctattactttaattgcttttgttgtctactgtttccacatgtgtttctgaaactgtccctataaactttgtaaagttcatcagggaagaagagagagaaagaaatgaaaataaacacagcttgcagcacatttggcattaacatgagatcagctgctctctgacccatttcctcatagttgtttggtgcctattgtcttagaatcacactgaccctagattacagtttcccttaactgctccataggtaacaacttgaacattacagaatattaagttttcccattgagacagtctttcagaccctgcataccagtgaaactatcaatgtcagctggcctgaaggaccccacgaggagctgactccccagagaatgcagtttccacatcctgaagatttcatcgcccttaccctaaccaatcaatgaccccaattcccagccccttgccctccatgatccccttaaaagccccagcccagaactctttggggagatggattgagggtctcttcccatctccttgcttggctgccctgtgatcattaaactctttctctgctgcaaaccgtgctgtctcagcatattggtctgttcctgcacaaccaaaagctgtaacacttctgctttctctgggttcagcccagcagaaccataatgtggaaatttcaactgggctgcctctgtctttgggcatatgcctcctcctccgtcaaacacactggtttcactctctgtcttttcttcttaacatgcatttccatgtttgcttcttcagaatgattccaaccccccaacttctaaatgatagtctggaaagaccacttaacaaaaagacctaagctattgatttaagccccacccatgctgttagctgcaggaccttgggaaaatctctaagctctcagccccattttctccatcagccaaacggaggtggtgatggttttgtccactttacagggttgttgtgagaattcagtgatgtggagctctttgcaaactgtgaaattctgtgtactttgagggagaataattgttaatatttattaaacattgtattgtatgatttaaccttcataataatggttttctatacagaaccatttttttattcttgttttagaggctgaagtcttagaaaagtatagtaacctgatgaagcaatttatttactgaataatgcaaatgagatttggctgtaaacctctaaactcatctccttctgttccttaccttctaccttgctctttacttcttatcattctaagataaattcccctttagagtttctggtcttgaaattacccttctatttttgctatattgcctgtggtctccctttttaacaccttgtaaggccacatctcttctgctatgaattttggatttcaagaagacacagacctttcctctctcctttttgccacttccattccatcaaccatcatttccttttgggtcacatataggcaaggggaaggtgctgctctgactgttttctctgtttcttgggaagagaaatagaagtgtatcttagttcagtttccctagagagcaagatcctagaggcaaaaacttacatccaatgctttgttgaatggtgtaattccagggaaggaagaatgaggcaacataaaagcaagggaaggagaaaggagagagagcacatacaagaggatgtgttgagcttgtgaaacgcttccagaaaggctgtatgagactcctgctcttcagaacagtatatggggagggaggaagggcaaggtaggtgtttactgtacctttcccataatctctttctcactgatggatcaaccatggatctctgtctccccgtggatcaaaaccatgggtattaatccccaaacaccatgagggggcaactctaggcagcctctgggaagctggagcctccaaggcccagactggctcttgtgctgatgtggccagctctcttcattcactggtgctgtgagtgggagcttggttggtagtggcagcagcagccactgggactttccataggagtaggatgagatgtcactgggtctgccctggctaggacatgagacacatagcagagacccaggttggataggtagggctgagtggatcttctactacgtcaccttcctcaccaaactcatcctcgtaaacacaggtgaatgcattgatgtcattatgtgccaaaggttaccactgcccttttaccccagccaccggtgcctactactcaagtggtgtggtcaacccaactccacagtcccttcttgagctccagctttctagggtcacacttgacagtggttgtctgcatttcctagagaacagaacctgagacaaaagtttccttgctgatggtttatttaggggaagatggtgcaagtcccaggaatcatgtctgagaaaaagggaaagtgaagcagaaaaggagtcaaagcaaatacaaggatgtgtgctactgggctgaccacagcattgcagtaaacacagggggttgctcaggaccctgggaggtttctagaaaagcacagggagccacccaggcagcttccaagaaagccagggctctagtcaggccagtgagtagggaaacggcctctccatcatgttagcacagtacacaggagcccattgggttttagagacagtggtggccatcaaaatttttgactatggcagggagaataatgtccctcccaagatgtccacaacctaatccccagaacctctgaatctgttagcttacacagcaaaggggaattaaggttgcaagtggaattaaggttgctaatcagatgacttaagaagaagaaattattctggattgttcttggtgaaaccaatgcaatcccaagggcccttaaaaacagaaaggggaggtagaagagaaggttggagcgatgggttgtgagaaagactctaccagcctctgctggctttgtaggtagtggaaggggccgtgagccagggaatgcaggtaccctttagaagctagaagaggcaaagacatggattctcccctgcagcctccaggaggaacatagtcctgtccatagtcctgtccttgattttagcccagtgagacttatgtcaaatttctgacctacagaaccataagctaataagtttgtgtagttttaagccacttaatctgtgataacttgttgcagcagctatggaaaatgaacagagtgaccccaggagcagatgattgtccctggagtctgcaaggttactggaaggggtggcgtgtggtcagaatctgattggaggcctctaaaggacttatcagatttggcatcctggagggtgagttccccccgaggtgaaggtcctcgtcaccgtgacagctcccctccacgtcagtgtccagagcactgcagggtagcttccacctcactgggcagcagtgttccattctctgtcctttgtccatctccagactctctcatgctcaagtacgttgctcttccattgtgttaaaagcattaggaacaccctctgtgtgttagaaaggcagctttctaaactgcctttcttgaaatatttattgagcgcttactttgggaaagaaggatgcctgcgaatacagggatgaacaagacaggttctgagtccattttcctaatggggggacaggacattaaatcttatgagcatatggctgggcatggtagctcatgcctgtaatcccagcactttgggaggctgaggtgggtggatcacctgaggtcaggagttcgagattagactggccaacatggtgaaacctcctctctactaaaaatacaaaaattagccaggtgtggtggtgcatgcctgtaatcccagcttctcgggaggctgagggaggagaatcgcttgaactcgggaggcagaggttgcagtgagccgagaccaggccattgcactccagcctgggcgacagagtgagactccatctcaaaagaaaaaaaaatcttatgagctcaccaataagtataaattcacaaatgatggtagctgttattatgaaaaagctctagaagctattcagattcacaggaggacatgcatgagatcagggactcagggcaggcctctctgagaggtgacatttaagctcatgcttaaatgatgagaagcttgggccacacagaacttggtggtcagaacaggcaggtgcatttccttgaacccggatgtgtttcctaccaaccaggcaaggcttttggttacattacttcaggtaggagctttctcctgcccaattcagcaatatctacaagatgcccccgctgtcttgtgttagaatatcaggtgaaatgtatctgagcacatgggattccttctaacagttgttcaatgaagagcgttggctctgggatgatggacacagggaatctcccccatcctcagcacgtctcaggagtctctgctgaaatttgggtcttgtttggtcgaaagagaaaaccgtgcctggagtagctgtggaataagggagaaccgtcttggccctggaggcagagaggcctggggctggatctcagctccaccatggactaacctcacagcttgggcaaacggccttcctctttgaatgagcttcccaagctgtgaaatggaggtcacaatgcctgcctcagggagaggttgtgcaggttcagcgaggtgataggtcctccacttctgttatatccaagacattcaaacaattataataacacactatgatgtaacactattcaaataattattaaccccatgcaagttcaatttttatgatgtggcaagatgcattgccccctccattataatgagtaggggtgtgtgtttgtgtgtgtgtgagagagagagagagagagagagagagagagagaaagagagagagagagatttgaaacaaacacgccagtcagagttggtgccatgccctcagagagggtgtcattcacagtgggaatgcagagtcaaatgtttcttagcacaacaatgtgctggaatagtttctcttaaaggacaaggtcaatgttgtcttaacaggaggaataaccttttctcatgtgggaaacattatgacttgctctgatgtggtgtctttgggccttacgtaaactctgaatgaggattccaggccacgctttctcctcgctcctgggagcagagcccgcaccctcctctttggttggttattttattttaaaataactgtttcagtttagaatagttttagatgtataggaaagttgcaagaatattacagagagttcccgtataccccacacccagtttctcccatacacaccttctactttgtgactcagcaaggatggagttggggagagcctgtgctggcacccagcgggagcatcttaacaaaacagaaggacccaatgggtcaccaaaggaagggatagaagctggaaagaagcaagggtggaagagaaggtgtagagaagaccccaaccgcgggtgcaggaggcagcgacagttactgaatttcccaaatttttagcaaacttccctccctcagcctgtaccacgagcaatcaaaaacacacttggaacagaacagagggactttgccacacctggagtatatttcgtattatttccagagcaggtggtgtaggaaatacctattgccaaataagaaatgctacagacagatcaagtcaaagtgcataaggaaaagaaccgttttaaatgctgaaatctcagaggtagttaatacttctcagaggaagaaaagtgagttatttgtaactcacttttcacggtcctgattttgaggtgtgtgtctgccataaaaacatgctagtctttaggggggcaagctctgctgtcttgagctctttcttcttagactctcagaacaaatatgtagatgtaatgtttttacttaagattacacatattggccaggcgtggtggctcatgcctgtaatcccagcactttgggaggccaaggcggacggatcatgaggtcaggagatcgagg[135 bp omitted]gcttgcagtgagccaagatcgtgccactgcactccagcctgggtgacagagcaacactccgtctcaacaacaacaacaaaaaaagattgcacatattttccatgtattattgtatggacatggctttagggttcctctcccaaaccatagcagactctggagagagggtggggagatctcaaatttttctggggctggatgattgggcacgtgggttggtggctttgcagagggaacctgttgcttcagtgacgtggggcagatggctcagcggtggatggcggagcaaggtgattgctggctgccatctcttgaatgatcctggcatgagctcctcctgttcctcctgggattgctatggaaacccagactgagttgttgtctctgtgtcggggctttcctgggtgtttttcctcctggcctcaacgcttacaaatcattctttcctgtgtgcagatcaggtgattctcccaggccctgtctgggcagggtgactgacaagtcaatttggtcagacaattgcttgggctgatttttccattgcactgagctccttgttttggctcctggtaaactgggtttgatctggggctgggaggtggaggttggggatcaggaagggagggaggggatgccatgtgagccttctctttctcaggggagcctgagagggaacggtgagaatccacagtccccaggtctgaagcagggagctgggctgtgtcgagattggggatggaggtatcattcccactttaaagatgaagacattgagttcagggagttgagctgctttacccaaagccacatgacttacgtggcagaacctggactctacctgagggcctggtggggagcacggtgtccttttcgctgcttaagtggagggagaactgaaagaagcctttgcctgatgttctgtgtctcctttttgtgatggggaaggattttggctactgttttaggtctgtggttcatgttgcccaaagcactgacgacaaatctgcacatgacctgaccttgggctttgggcaaccctctagatgccagttcccgagaaagaccctccacactttcagcttgcccatctgactgatgggaagcttacccctagaaaggcatggctgaagcagagaacagaaagtgtgatccttgaggccagagacttggatgtttatttcgcttctggtacttactagctttgtgaccttgtgcaagtcacctgccctctctgagctttagctccctggctgagcaatgcacaagccacctgccctctctgagctttagcttcctggctgagcaatgcagtggttaattattgcttggcctacctatcagggttgctgtgaggatttaataagattggaaacatggaagctttttgtaagcccataaggtcaagccaagcctccatgcaagagctatgtggctttgatattcttgaggcccagaaggcaaggctgacttctgaagccatgggtttggggctggggagggtggagctggctcagagtttgcagccattcaggggccatgttggtgatttttcccttaaggaggcctctggtctagggggccagccagggattagggaagaggatacacgctggcccatgcttgtgcttggcaatgccttgccacacctgccctcttttgcccctcacatctgctgaatggcaggaagatgggccattgggtgcaaagaggacacactacagtatggctatgaagagagggagtggcagtgcatgcgaaggctggaactaaaaggcaacttgacttcttccactggcgtggccaaggttgtccatttgcagagtcacgtcgtgctttacgtaaaagctgctcagggagcagggctcagagataataaatgtagctgagtttggaaacagccacatccccattcaccacggacagaagtgggagtcagggatgtagcccagggaggcttcacccctcacccctaggcagccctttcttcctcggcagcaacactgtgagaccctcctcttttcacagcaggggccatcaggcccggaagtaggcttggccagagcccaggtgcaggatcaagcctcacttgaggttggagatgtggaagagttctagcctccccttctgggctcagcatcaagtcctactgtcagcccgtcagccgctgatgctagggttgagttatgctaaccaggcctcggcctccatctagagccccagcctctcctctccttcccccaactgctgggattcccttttcttttcttttcttttcttttcgtttcgtttcttttctcttctcttctcttctcttctcttctcttctcttctcttctcttctcttctcttctcttctcttctcttcttttcttttttgagacagtgtttcgctcttgtcgcccaggctggagtgcagtggcatgatctcggctcactgcaacctccacctcctgggttcaagcgattctgctgcctcagcctccggagcagctgggattacaggtggctgtcagcacatccagctaatttttgtatttttagtaga[137 bp omitted]ggtccattcccagctctacttctttcagtcgctatgaggccctgtttccctcctcatcctttctaactgccccttcttaggggtagtggcccatccctggaccccagcccaacattggttcctctaagctcaggataggaagcaaagttctgtgtgttgagggcctttttttgcttctggccctttaaacctaagtagatcaaagaagtggattctaattattcccattgtacagaggaggaaactgaggctcagaaaggctaagagacttacctaaggtaacatgaatggtagagacaagattccaatccacatccacagggattcaaaggctgtgctgggtcttggtgcagtcacccacctgcctgacgcctgcaggggtctgatttccagggggatgtattccccgtcctgggaacctcctgtttgtgctgttttgctgagagccagacattcagtgcacgccagggccagccacatgactccacttcagactggttctttgacaaagttttagatgttccttatggaaacttaaccttgaatctgtttctctgtcctgctcaatagttctgtgtattacttaatgtgaaagtaaggctcagagacaatagcatttagaaaaaaagaaagagcttacttgtaaagaagctcaagagagtcagaattcataaagactctggtttatcaaataaaacacaacaggaatttaaggaaaaaagcacgacaaaccttccaaggtcactgagtttgttttgagtccattcatggcggaaaatagcaattttctcacatattatcacacccataaaagtcgtgacaaatttttagatatcagcattgcccaagtcagagataaaaattgttttgttatgaagttagccaactaagggaaaggctcaagatttcatttgttttggggggccagaactagataggatgatcttcttatttttggtttcttttttcctggttgggagacatggtgtgttcacttattctttattttttaaattgttttgagatggggtcttgctatgttgcccaagctggtctcaaattcctgggctcagtgatcctcttgccttggcctcctaaagtgttgggattacaggtatgagatgccatgcctgatcccaggctttttttttttttttgagacagagtcttgctctgttgcccaggcttgagtgtagtggtaccatcttggctcactgcaacttctgcctcccaggttcaagtcattctcctgcctcatcctcctgagtagctgggattacaagcatgcgccaccacacccggctaatttttgcatttttagtagcggtggggttttgccatgttgggcaggctggtttcgaactcctgacctcaaggttatctgtctgcctcagccttccaaagtgctgggattataggcataagccactgtgcctggcccccacttattttttaattttttaatttttttgagacagagtctcactctgttgcccaggctggagtgcaatggggtggtcttggctcactgcaaccttcgcctcccaggttcaagcaattctcctgcctcagcctcccaagtagctgggactacaggcatgtgctaccacacctggctaattttgtatttttag[131 bp omitted]caacagaaacaagggtcagtgttgtctccacactgataaacacctcctctcctgataaaatccagatggcagattctattgcttgcaactgactgaaagagccccaagggtcactgagtgcaactcctatgttttacagacgagggagcagtggcccagaggggagaatgttgcttacccaacggctcctgggatttccctgcttctcttggtccaagtgtcctctgtgtcactcaggcctgaccagaaggcctgggacggaactccagtgttctagcccctgagacggagagagagagaggctctgcgggtgttcttggtctcctgtcctgggtgaccatcatgttcattctgccatgggagtgataacgctgaatgcgcagcttggcttagctccccacaggcagagccttttgaaccccacttcaggttcaggttcagtcccagctcagatgctagggccctcccacacccaggcaggaggggtagagtcactttccacgtggctcagaggactccatggcaagttttccaggttgctagtctggccctgccctcttagcctgatatgacaaataccactaccaatagcaatggtcagtgcaagcatcgtgctaatgactttgtacataatgtaacatctatttctctaacaactatgagcaggtggttttatgtccaatttgtggatgggtacactgaggaacagagcagctaagtgacttgcctgaagttctagaactagtgagtgtttacggaggcaggagctgagctcagttttgtctgaatcccaagtttgttctcccagccacatgcgtgcagcctgactcagtgagctcagttcatacaattgggctgcagtgctgttcctccctggccagtatagtcccactttgagcaactagttgggggtggggtggggcgggaaggcacctaaggacctgtcacctgttgatgtcactttctgacagtctcaacttccaagtgtcccctggctcttggttccctggagttaggagccaggctgtctgtgcccgttcttctcacaagtggtgctgcctgttcaaatccttgcccctcactgagctgaaagaattctcagtctcttctcagctctgctgctctggttctaaggagcagccccccgccacctaactgagagagatgactcaaaaggcctgcaggagtggagtctttgcatgtgagcgcacataagaatgatgccttcccagaaagaaaaacatctcttgttttcttccagtaaatcaaggctgggaggtgcatttgtttaatgggttctgtccacagctaatctaatttggtaaatgatttggggggtgggggaaaatgctgacccaacacttcagagaatggactcagagcaaggggtgtaggcagtgacacgcagcgggactgtgagcaggagaaggggctggagaacctacctgtgcgtcagggtttcctgtccccttcccatgtgacatgcactcacacacatgcacccatgcacaaacactcacacttgcatgtatgtggatgctgtctttcctttctggctcttagatatcagcattgccaaagtcagagacaaagtttgttttgttacaaagtcagtcaatgactgggaaggctcaatatttcatttgtttgaggtggggttgggggcagaactcgatagggtgatcctgttagttttggtatattttttcctagttgagaaatgtggtattcacttattctatttatttatttattttttccttactcgtggacgcacatgtgtttgcttattcgttacgatgacaggaacaagggccagtgttgtctccacactagcaaatacttcctctgctgaaatgtctgtccacgtgtctttctgcctgttagaaccacagctcaccaggatctagagagtagacccatccaccatagcagatgagtcacagatattttgggaagggcaagcattcagattgaaggatgaggagtatggtagacagaataatggcccccaaagatgtccacatcctcaccctcggaacccgtgaggatggcaaaagcgactttccggatatgattaagttaaggacctcaggatgagagcgtcctggcttatccaggtggtcctaatgtaattataaaggtccctgtaagagggaggcaaaggttcagcatcagagaggagatgcgatgacggaggcagaggctccagtgaggagctttgaaggcggaggcaggggccatgagccaaggaattcaggcagtatctataaggctgaagaaacaaggaaacgaattctcccctacaactatcagaaggagtgcagctctgctgacacttattttagcctgtaagatctgctttggatttctgacctccagaactataatctgtctgtgttattttaaaccactaagttatagcagcaataaggaactaacatgagaaatcaggagagctcaggcatggggtgggtgggtgcctgggctctccaggcacaccaagagactcacaccgtaggcagaatgtggagacagatctgggagctggaaagggcctcagaagtaggctgggatcagaacaatgctagaggtctctggaggatggagctcaacaatgtttcagaggtgctaagatcctagacacaaagataggggctcaggtatgagggactaagacttgaggatggggtacagggtgtggctgtggagaaaaacaaaggaagggcctgcttctgataagctcagcttggtgctgagctgtgtgctctgagatttgctctccttacctgcaaaacggaggtcttggctagctcagaggtcacagactggaggctataggcttgatacagctcacagacgtgtttagcctatactgggtttttaaaaacatttggatgggtaagccatggtggctcccgcctgtagtcccagcactttgggaggttgaggtgggaagatgacttgaggccaggggttccagactagcctggtcaacatagcaagcccctttctctatcaaaaacaaaaacaaggccgggcaaggtggctcatgcctgtaatcccagcactttgggaagccaaggtgggtggatcacctgaggtcaggagttcgagacctgcctgaccaacatggtgaaaccccatctctatgaaatatgcaaaaattagccaggagtggtggtgcacacctgtagatccagctacttgggaggctgaggcacgggaatcacttgaacccaggaggcggaggttgcagtgagccgagatcacgccactgcactccaacctgggcaacagagtgagcctctgtctcaaaaacaaaacaaaacaaaacaaaaacaacaacaaaagacatttggaccggtattttaaaatcattagatttcacatataaatccgatgttctgaattttatcttaaaatatagggtgatccggcaacaattggacctatactcctgcctgtttcagagcctcctaggcaattccagctggaggtggaacgttcccaggtgaggtaggccctgcagacgtgggagtggggtcactgtcacccaaaaggaggagcatcggctttttagaccggggcctgaggagcccccaagggaagtgtctgaaccacgcaggttccttacagtcttgagctcagatttaacttgacaagtgctgagtgcagcgggactcttagccacattgatccggacactaaactcctattaatgtagtcagagaaagcaattgctttcttggcagccacatgcggctggcggctcgcacagaccttgcagtcagatggagacaccaggaccgccccgtgggagcagctgtgagctaagacttccgcgcctgggtatccagcctcagtgcaggcttcacgctctggctctgtcagtgtggactgtcactttagctgccagcctttcctgtgagtggcatcctcagctgtcccctgcactggccccttggcattttcctaacccctacacaaaagggcagcgggatcttggctagggggctcagagcaatgctccctgctccccaatttggccttccctgctaacatccccttccctggtgttctgaccctttttggcttcctccctcagcacatgcaggccccccccccatgctctgttttggatgtgtcttcctggtgctccctcctcaggctcactccagtggacatgattttgcttctgacctctggacttatgcacctttgccaggcccaacagcttctccctttttcgtgctatgtggggactgtgacggccaggaccccttcccagcccccgcagcgcccccctcagtcaccaaagtctgtcttttttactctctgatatcttcgaagttgtccatttctttcacccccagtgccatgcgtgtccagcccaatctctcacctggctgctcccagagcctctgacctgtactccctgcctccaggcttttcgcctccagcccactttccaacagcagccggagagctctcttcagaggacaaacctgaccatggcaactctgtccagaatccttcaatgcatcgttccggatttcaagatgaagcctgagttccaggcagttccagacttggccccggttctctcctccagcctcatggctccccgcatccatcccccagtccatgttctggccatactggtccatttgcagcacgcttgcttcctctgaaacttggacttttgcacacgttatcctttttggcaggaacccgctcttaccccacccccttcctctggctaactcacctttcacatatgattatggcttccctgccaccccaccacccccaggataggcttccatctcttgctcttatgagacccacctccagtcatggcactgggtaactggcctccctcagtgattactgcttactgagttatctgtctttcccaccagactataaactccttcaaggcgggaactccatctgttttgcaccccattatacccccaccgcctggtgtaaggctgggagtagcaagtgcttgatgaatgtatatcgaatgaatgaatgatagtgatgatgaagccaagagcaaagaaagcccacgcaggcagagacttttctccaggttcatccagaatcatcttttttttttttttttttgagatggaatttctctcttgtcgtccaggctggagtgcaatggtgcaatgttggctcactgaaacctctgcctcccgggttcaagcaattctcctgcctcaacctcccaagtagctgggattacaggcgcctgccatcacgcccagctaatttttgtatttttagtagagatggggtttcaccatgttgcccaggctggtctcgaactcctgacctcaggtaatccacccgcctcagcatcccaaagtgctgggattacagacgtgagccaccgcttctggcccagagtcatctttaattgcctctctctagccacaccccatggaagttgaattagccgggtgagcaaggaatcgactgtaggaatcttcccaactctagcaacacctagtccccatgtctccaccttgtccacaaagatgacgtgggagatgttgccaaccgcctcactgaatcaagtgacattccttccaccagaacaggaaatgagcttgatttggtataacaattgtcagaaaacactgagtttgtctgattccagagatcagctttcttaaccactgtgccatcctacctgaaagacaactgggaatcagtctggagctcacttcccacaggacgggctaaagagtggtggtccaacaggcaaagatctgaactctagtcctcgttctgccttagggagctgtgtgacttggggcaaatctctaaccttctctgggctttcatttcatgggacctaatccacagggctgtggtaaggactcatctttcattacttcagggcttataaagggcagggaccaggcttctctatgtggacttccccattgctcagcacagggcctggcccatcaatagccctgaaaatatgatcattaaattgaaaagctctttgcggacccctttctaaaattcttcatcagtcaagcacttgagccgggcagggaaacccactccatcctcactaactggacaattgcctcatgtcactgatgggtgttattttgtcctctgctataatgcatgtcttttaaaaagaaaattaggatctgtcaagcaccattacacaatgaacccagcaaaggggcagccaagcttccagccaagcagaggccgcaagtggtatggggagcagttgtctagagctgctcattgccgaggcaatactccacatggagggttccctgcttgggaagtctccttctcctcccaggtccctgccccagagaggggagtggggagagtttgatgtaattttctggcctgagaagcaaaatccgcttctgaaggcactcaggcttccatgcctgcccacgcactggagatttgtaccaatgagaaggaccacaaggaaggctggagctgggcaccctagtagggacggctcctcctagtgttcagtttgcacctggtaatgttttggcaccatccgtctactactaagagggaggtcttttttctagatgaggaaactgaagcttggaaagagtccagcccagaacgaggtgagtgtgaccccaaagcctgtgttctttgcagacattgtgctgcctgccttcccctgaggttctgtggaccacggatgggggaaggctagcaacagagtgagtatttgggatcctatgcacatcgggaggagcatagcctaggacttccatgggaagacacgttttttatttctcactgcgttggttggttgctgtcaggagccaccttttgcttgacccgctcagatgtgacagacagtcctgtggtggaggttgaaggatggcactttagacgcttcattctcagtggcctcctaagcaactgagaggtcctcacccacccatgctgcttccagggctggccctgccctacactttgctattccttgttttttcctcctagtcttctccctcgtcttccttcccctcctcctcttacttctcctcctctttctctttctcctcttactcctcctcctcccttcctcctctttcttctcttcttcctcctactcctcctctttccttttctctttccttgccctcttcttcctttttcttccttctccttcatcctcttcttcctctcctcttcctttccttttttcctctgtcctcctccttctcctctcctcctccttccttccttctccctcctcttctctttctcttcttcctcttctctcttctccatctttcctctccttcacctcctctctttctccttcctctcctccctcctgctcctcctcgctcctcctccctcagacagtgctcacagcttctcacctgccagcacatagaactgggagaaaccagagccagcctcacatgtgggggaataaatgctgagctgtgacaatcctgcctgcctcagaaagagaggttttatatagtttttggcatttacaaatcctttgtgaaaaggtcaccctgttcttggaatcttttattaatgctgaagactggccccggaaatgtcatgtctttttaccatgatatttactcaaaaaagtatgactaaccatcggaaattctacgagtggctcgacccaggtcaggctgggtgaacctgtgggggacaaatggatgctgagctcgctggtgttgttgggctgcaccttcccctgagccctgagtgaagggaaggaggagcatgccagggtcaggtacctgggcacccatctgctctgcatggctctctgctgtcccagttcctcagaggctccagagcacagaccagcactccaagctggaagggaccttgtgtgtacaacatcccaactcatcattttacagaagtggagacaggctcagggaggggaagacacctgcagggtcacccagcaagtcagggacaaagcagagactagagatcaggtgtcccgatgtccaagtcagtggccagtcctgactctcactcctgcgctgagcctgagaagaggatgggggctgggtgcggtggctcacgctagtaatcccagcactttgggaggccgaggcaggcagatcacctgaggtcaggagtttgagaccagcctggccaacatggtgaaacctggtctctactaaaaacacaaaaattagctgggcatggtggctcacgcctgtaatcccagctacttgggaggctgaggcaggagaaccgcttgaactcaggaggtagaggttgcaatgagctgagattgtaccactgtactccagccttggccacagagtgagactccgtctcaaaaaaaaaaaaaaaaaaaaaaaagggaggggatgggaagtccttcctgtccctgcatcagagtccaaggcagtagggtgcagagtgagacatgggcgtatccctcacctgcctcccttccatcagcctggaattccctttatgtcatcctactccaggttacatagcacagaagccttttctcaaaaccctgttgcctttctagacagtcctggaggggcttgggacaggaagaggttagagcctaccttattgtcttagtcagctcaggctgccccaacaaaatatcacagatcgtgtggcttcaacaataaacacttattttctcacatctctggaggctggaaggctgagatcaaggtgccatcatggctgggttctggtgagggctctcttccaggcttgcagatggctgccttctgcatcctcacctggccttttctttgtgtgcatgcagggtgaaggcgagagtgaggaagctctctccttaaaaggacaccaatcccatcatgagggtgccatcttcatcacctcatttaaccgtaatcactttccaaaggccccaccaccaaataccatcccattgggggttagggctccaacatatgagttttagggggacacaagccttcagtttatagcacctacaatttcacagggatcatttggagagggtgaaacaatggatgtgaaattagtgtgtaaactgtagcttgcacacccgtatacatttttattattattatttttgggaggaaaccagagaagaaaggagagcacaatgcagcctgctcagcttctcagaggagctcgtttggagaggagaatgagcctcaggcaaggagaccctgggcagggggaatggagaagacatctgctgttgctccccagcactcactcccttccttggccacattgtcctccagcctcatttcaatggtctgaatgaatcatgaggccagggccccagccaatcaccacatcccatttccctggccacagtgattgcttcagcagtgggagcttgacccttagatgtctaattagtgttttaaggacttttgttgggactcactcttctgtggtggatttgaacctggaaggatagtatctcaagagctgctgctacagccacttgtggccagaggggccatctggctgtgcccactggaagacataggtgagaatgcacattcttatgcagtcttggtcttcatgagggcaggtgtttggtttgtatgccaagtacagtgcctggaacatagaagtactgataaatatttgttgaataatacatatttgagaccctggatacggccatgcctggagctagctctttctgaactccttcttttacttaagccagcttgatcacttgcccctaaacagccttaagtcaaacagggcatgaggttaaaggcaagagcctggagaggttagggcggggtaaggggctgctctaaggctgtgcaaagcccagggcaaggggctgctgtggactggtctagctttggctgtgtagacgcagcctgaaattcagcgtgggggtctctgtgcatgagggctcctggtcatgcactgggcacaaggaggcctttttgccctttgaaggaaatacaaggtcccagtgccccctacctgaggtggccctgctctggtagctgcagaagaatcattggtgcagaaatcaaaccctgccatggcttaggcctcagactctgccatgaaaaaactcccttggccattagggtgctttcgagagtgtggttgttcagcttatcccctctccattgctggacacagctcaggatgcaggtcaggctgttttaagggtgaggttcccttcttgtaactttcacttgtgtaccctcccatcctatggctgctgccaacagtaaaataaaaataaaaaccttatttcaatgtttgaagtgagtaggtactgtgagctattgaccctgaagtaggtattactgttattcctatcaaacaaatgaggaaatggagatccagagagctgaagtagcctcccagaggctcaaataggaatggtgggactgggatttgatcatgggtcaaatgagtctgacaccttggctcctaactgttgtgttatttgctgcttgaaagagatagtatcaggagcctcatggtgggggggcctgtggggaaatgtcagagctgccatctgacaaggtggtatctgggggccccgctcaatctgcctgtgtccaagctctgggcttcctgggaggtgcccctgctggtggccatggggagcctgttgggaacaaaacctctgctgggtcccttgagagctcatgggattacctgactgttgagcagggcccagacaagcagctcacaggtgggaaggagggcctgacctcaatgctcctcacacgagtgatgctgctgcccacacaggtggcatcggcacatggccagggcttccccacctccactgatgagggaccagctccacctggggcttgtgggtggctgcctggggttgggggaggccctgcagtgtgtacagttggcaactgtgcgagggagaagttctgggcaggaattccatgagctgtgtctgccagaggggctgtatcctggctggaggcctcctcctcccagaggcactggagctcgaactatgctatcatggtgtggcaacgaggagcagaaattaggggccatgaatctaggcattccttgtgctgtggattacctaaggaaaactcagggaagtagaacccagcaccctcctagggtccttgtttctgcttaccaagctcttcctggtgacaggggcagtccaacaaggtccagccccagtgggtgctgatgggggcaggaatgaagcttggcctccaccccctgaggcagtgaggtcgagtggtgctagcatccctgttgctggctcttcccaggcctgctccttatcctgagagtgacccattgatgggatgcattgtgcccctcctctaccaggggagaaatggggagtcagggtcatcctgggtgactcagagacactttcagttaagtactggccccttgatgtgaaaataggaacagggagtcagcagatgctgctctgatgtgataagagcaggccattatttcacaaagtgtaggatcagtcacatgaccaggaagaagtcacacttctcttgtaaactaaaatatgatgtctccagggaaactcgattctttggttgaaaggtgagtttgtccttaagtcatcaggagaaaacactggttatggctgtggttggtggggagagcctgacgtggaattgaagcctggtccaccccggcccacaggtcccagtcattctgggacagagcaggggaagtcccatgatatcaggctgaagatggagcgggcagagtgcagggcaagaggcgagattccagtactgtttagaaaggtgaaaagtctccagggaagggtgggggtacccaggtgggggccagggggctgcaggtggaagaggcagtggggctgtgagctggagagtgggaaggaagaggggtccctagtgagacctagttcctgtttctccaccctgtgacgtgaggatgagatgccagagcagtggtcctcacacatcagcacacatcagaatcactgggagggtttgcaaaaacatggaccgctgggccccaccccagagcttctaattccgtaggtccgggattggaactgataactggcatttctaagaggctcctggtatcactgatcctgccagttagaggaccacactttgagagccactggtctagatgtggccggcttctattgtacaattttttggtgcttactcgaattcctcaccagggagctgcctacacctccctcaggttcagtgtgtgtttggtctgagaagatgaagagtgctggcgggggacggggtggagcggactcccccagataatggggctgggcactgatttttccttccccggggataagagactagaggccactctccagcctgaggccatccggccaattcctctgatttacccactcccccaagtgacaaaggacacccctttctaggatggaaagaagggcccctgctatgatagttactcaagagtgccttgtgttggggcgttgaggtttgcagaagtggaagtggattggaaaggagagcagccccatgacagaaccttcttgttccttgcattgacatcaaagctcaagctcacgtcccacctcaccttcctctgctgtgtgatcctgggggaacttaacttagtgagccctgattttctcatctgtaaaatgggaacaatgaaaatgtctgtcctactgctcactgggattgttttgggaggatgaggcagtggatgtgaaattgatatgtgagctataaattgtgtacctgtgtgaattctaacactgttttaagtttgcaagggaatcaaaggagaaaggagaaatggaacagtcatgaagagagcaactactttccattgggacccaggcattcatttcctctttttttctccttatgttcagaaaactcagattaaaaataacatgagacatgcacacgtatgtttatagcggcactattcacaatagcaaagacttggaaccaacctaaatgtccaacaacgatagactggattaagcaaatatggcacatatacaccatggaatactatgcagccataaaaaatgatgagttcatgtcctttgtagggacatggatgaaactggaaaccatcattctcagcaaactgtcgcaaggacaaaaaaccaaacaccgcatgttctcactcataggtgggaattgaacaatgagaacacatggacacaggaaggggaacatcacacaccggggcctgttgtggggtgggggaaggggggagggatagcattaggagatatacctaatgctaaatgacgagttaatgggtgcagcacaccaacatggcacatgtatacacatgtaacaaacctgcatgttgtgcacgtgtaccctaaaacttaaagtataataataataaaattaaaaaaaaattacatgagacaaaagtccacacttcagctgtcatatcaactttagccaggacacccactaacatgaaagatgggggttagttgattatttgggtttgggaaatggtcaatcgtattttggaaatgttgacatttgctggcttgggaccatcacaatgttgcccacgttccttcttctgaggccgaaagttaatcaggaggatctagtgaatgttgatgtcccacagagttggtccttgtcagtatcgccccaatataaagacaattaataagcataatccaactatgtcttattgcacacatgctgtagaatgcaagctttatgggcatgatttcaacttgcaaggtaggtactattgtttccactatagagatgagaaaattgaggcccatagatgttaaattacttgactagggtcacaatttcttaagtggcaaggttcttgccctttgactgtacccctttgcttctaataagggacatgaaaacactttgtgagctgtgcagggttgaacaactgtaagagatttgttattagtgctcagagcaattttcttgagttttaaatttccctagttgcagaaatacccagctacttatgcatatggacactagcagcgtcgcctatgtggcctctgcagcatcctgtagtcttgataacagattctcagctctaggagaccacagctcctcagggtcaaaggaaagggcattttataagccttctcaagttttgttttgcattggtgtattgcctgggaatagcttgtctcctcctccccgcccccaactcaaagccactttgttgcaccagcataatttcttacaataacattaacatatcatgggagctcattacctttggtgtaatagttccctattgaactgtgtcagactaattatgtcagttccttttcattccagtttagtgcttctccagagagtcgcagtgcagcaccggtaataatgattaaactgctgtctaatgctccactggatggccaaaccaaacaggggaaaattccttgctgaagatgggactctcagcatcccttgtacttgatgcaatttggtgttttaaaagccattacctggaggtcatttccacatgacaatggagggctggtagtgtttcttggggatggcagacaaaaaagcatatcagggaaggaaatagctttgcaaggcaagaagtagcagagaggcaacccaggtgctttccatttgtgtggtgagccctcaagttctgatggggaccatctggagccgtgctttacaacttagctggcagaggagggtgtgcaggaaatggccagggtaatgaatcaggacaagccaatgtcaaatgcttaaagctctgctgccagttcagaggaaaaagcccagggaagatgaatgaaaatgaagtcattttcaccttcctgtagtctcatatagagctctttgctcgagcctaaatcgaacatgctttttgtctttttgcataaagggaaggaaggaaatttcatgcttcaacaagagcttcaacagaagttgatgctcttcattgcctaaagggatgctagcctgttctgagcacctgttcttgacgagtattaatgagcctaataataacaacaactgttactattaggcatcagttacgtgatgactttgtgccaggcattgtgttaagggtttcacaactgctagttaatataatccgtaaaataactctacgggtaaaagctgtcttatcattcccattttgtagatgagaaactggggcatagggagattaagtaacttgctcgaggtcactcccagaacacccatatctaactctgaagcctgtatgcagagttatatttcctcttcgttcattcagtcagtcaatatgatgagggcctttctgttctttagccatgagctgtgtccctcagacattttctgaacattacagacacagtctctggcttcctggggctgagagctcaacagtaaatttcagtactgggtgagccattgtatgagtgggcaaaggcagacagctgtgagaacaccttcgttcattcactcacaggtatttatttgagtgtctactatgtgaaaggctttgctgggttctaggacactggggtcagcaaaatacccacagactttgctttaatggagtttttagttcatattatagaagcccatacagactgagacaggaaattggtacggagaagtgggggtgctgctgtatcaaatacctaaaactgtggaagcagctttggaatagggtaatgtggaaaggctagaagagttttaaggtgcatgctagagaaagcctacattgctgtgaagagactattaagagtgattctggtaagagcttagaaagaaaagaggggagctgtagggaaagtctcagtcttcttagagaatacctaagtaatcaagaatgctggtagaaatatggatggtgtctaagcccattctgtgctgctacaataaaatgccagagtaacttatgaagaaaagagaatttctcacagttctggaagctgggaagttcaatatcaaggtgctgacatctggcaagggccttcttgccgtgtcgtcccatggtgaaagatgacagagagagagagagagagagagaagaaagggccaaattaatccttttatgaggaactcacttccaggataataaaagtcctctaatccattcatgagggcagtggtcccatagcccaaacacctcccattagcctccacttcccagcactactgcattgaagatcaaattttcaacacacgaactttggggaacactttcaaaccatagcagatggtaaaggccattctgatgaggcatcagatggaaatgaggaagatgttattgaacaatggaggaaaggtcatcctttttacaaagtggcaaggaagttagttgaattgtgtttgtgtcttagtagtttgtagaaggtagaacttgtgagtaatgaaattggatatttggctgaggaaatatctaagtaaagtgttgaaagagcagcttggcttctcttgacttcttatagtaaaatgaaaaaagagagaaatgacttaaagatggaattcttaatcagaaagaaagccaaacttaaagatttggaaacttctcagcctttccatattgtaaagaatgaaaaggtctgttcctaaagaactttaagggtgtggcccaatggccacatcttacatggagttttgtcagccatctgaacagaagccaggggctattgttcaagacgatggaagaatgaaccccttccatagcaaggtgctccagagatcatcagaacaacttcataggacgggctgcaggtgcctgctggacccctgcaggctttgtgtagcatccctcatatcacaggctccactccactgcattccagggttttgctgcttggctgcccatccagaaagcacaggcagcagactttggctgtgtctgcgtggtgctcagagtgcatgagctgtgggggcaagcctaccttcacctagatttctaagaatggagccacctgaagtcatgggtgtgccacccaggcagaaaactatagagggccgctggtagggcaatgcctagtagtaccaaggtggaaaggtcaccctgagaccccagaacagtagaggcatcagtgtgtgattccagcactggaaagccacaggcacgcaactccaacctgtgagagctgtggcaggggttgtatccagcaaagctgtgagggcagctttagaagttgggtgcccaacttctaccctgcaagcctttagggatgagacttccacaccagtgggcccggagggcagagcattgagccaaagaagatttttctcaagcctaaggttttggacttgcttgggacctgtcactctttccttcttcactatttctcccttttggaatgggaatgtctgtcctgtgcccaaaccaccattgtattttgtaagcatttaactttgatttcacagactcagagaaggaggggaatttgcctcaggatgaattggaccttgagtttcacccatatctaatttagatgatattcgaatgagactttggactttaggttttgaattgatgttggtatgagttaaaacttttagggttattgggatggaatgaagatattttgcatgtaagaaggacatgaatttcgggggtccagaggcataatcaaatggtttgaatgtttttatcccctcaaaattaatatgttgaaattataacccccgaaggtgatggtattaggaagtggtgactttgggaggtgattaggacagaaccctcatgaatgggattggtgctcttgtaaaggaaacccaagaaagcttgttaaccccttccaccatgtgaagacatagagaaaagatggccctctatgaaccaagaaatgggccctcaccagacaccgaatttgctgacaccttgatcttgaactttctagcctccaaactgtgagaaataaatatctgtttttataagccacccagtccatggtagtttgttacagcagttcaaatggactaagacagccaagatgggaaaatgtaatcttcatttaacatttattaagcattcattatgtgccaagatctatgataagtgctgttaatcaagtcagtttatttagccctcaccatagctctctattatttatatagatgagaaaatgaagccttggagagttacgcagtcagcccaaggttacttctcctagccactatgttcaactgtagggagacttgatctatttttggtgatcagtataatggggcatattccatttttctcttgaggggttcttattccaagaagaacaggccatcgagactctcaagcctggctttgcacccctctcatggagcctatcagcttggtgccagttgggggccttacatccctatgggctctgctgccatattggttgaggatggagcaaagaggaagaagccttggcttagccatgatgaaaagacagcagagaaacatgtaatgcctggtctgttcctttggttcaaggaagggtatacatctacaaagactctctatggtgttaattgcacatctattatgggctgacttgtgtccccaccaaatccatatattgaaaacctaactctaatgtgatatttggtggtgggagtcttagggaggtaattaggtttagatgaggtaatcaaggtggagcccccataatgggattagtgcccttttagaaagagaaagcagcatcagaactatctctttctctgccatttgaggacacagtgaaaagatggccatctgcaagctaggaagtgggtccttctcagacagtgtagctgccagcaccttgaacttggacttcccagtcttcagaactgtggaactaaatgtctgtagtttaagccatggtatttcattatggcagcccaaattgaataagataacattttaaatgtgacgatatatgggaatgtgtcttgtaaatggtaaagtactgggcaaatggtaatcatcagtgacttcatgagtcatacatgctctgatgcactgtgcctctacatcaaaattacctggtaaaggtagataatgtgagaaagtgcagatttcctggggcccactagccttatatagtgataatatgactctacccacagcagcacagcagtttttcctaagatgagttcctagcaacactatattcattgaatatttatagagattacttgagaatagggattttgtaaaccaataaatttagggaacactgggtaaattaggatttttttttcttactgagggcttctcagggcctttaaaatgctttgtaatctaccagagaggaaataatactatttcccaaaatgcacttaaccttggaatatctttaccccaaagcatcttgtgggaatcagtttttttttttttttttgtggaatgtaaattatttggtgaatgcaaaagggaatgttaaaccaggacttacaatgtcaaatgccctcaggagccaggcaggtagtgctgctgatgaaagcaaacggagtcagcaacagggaggcttgaggactgggggaaattttggtctatgtcttcctgtttgaattgggcttctgaatgcaaattaaaaaatttgactcatggctgctgagacctctggaaatggcactttcccagaagcaaaagagaggaaccctgggataagcctggacaagggacacacgaggaaggacctgggaggtgctcacctgcaggtggggtgtggttgctcagcaggtgagcctccccaggaaggtgtgcccaagtggtagtgagggtatgaggagagggctggagacggtgttgtgggcataaactcttggggctgtgtttctccaactttaatgagcgcatagatcatctggggatcttgtcaaactacagattccaacctagcaggcatggagtgaagccaagatgatgcatttctacccagttccctggtgatgcaaagcagcactgaagataggacccagggtcttaggacttaggctacctggagcgagggaggctccatccaggccatatttccttgtaattagagtttgttctgattgtaaggaagagcttgttgttctcataggaagggggtgaaatatgaattcagaactggggcgtgggagatagaggacggggaacacaactctacttaatttaacgaagataaactaagtttctgctctggaactgtttgcattataaaaccgacagtgggagggataagatctcgggttctggaaccagactccctggtttgattatgggctctgctgagtgaccttgaacaagatatcggacctctctgagcttgagaaaatagggcaagaatagaaccccacacattgttagttatggggattacatgagttactctctgtaaagcatttagaatagagccttacaaaccttcgctgttctctaaatctcattctgaatgagacagtgtgagagcacttacgctgtagctatcaggctgtggaaatacaagcagaatagttaagaacaacggctttgatttcagacagacctgagttgaatccaagctctgttacctattagctctgttaccttgggcaagtcactgaacctctcagagcctcggtttcctcatctataaaatgggggtaatcatattagaaatggggcttaactaagacagtccatgggaaagcactttgccaactgtaaagtactgaacacatgcaaagtgttcgtgtgcagtggtttttcccaaagcagcccattgagtaggcagagctgcttttgggaatgatggcggggttgtgacatgagactgtgtgatggttgggagtgatggcggggttgtgacatgagactgtgtgatggttgggagtgatggaggggttctgacatgagactctgtgatggttgggagtgatggaggggttctgacatgagactgtgtgatggttaggagtgatggaggggttctgacatgagactgtgtgatggttgggagtgatggaggggttctgacatgagactgtgtgatggttgggagtgatggaggggttctgacatgaggttgtgtgatggctgtgtaactctgtaaataaaccaatgatcactgaattgaacccttagaaaggtgaattttaggccgggctcagtggctcatgcctgtaatcccagcactttgggaggctgaggcgggcagatcacctgaggtcaggagttcgagaccagcccgaccaacttggagaaaccctgtctgtattaaaaatatgaaaaaattagccaggtgtggtggtgcatgcctgtaatcccagctactcgggaggctgaggcaggagaattgcttgaacccaggaggtggtggttgcagtgagcctagatcacgccattgcactccagcctgggcaacaagagtgaaactccatcgcaaaaaaaaaaaaaaaaaaagaaaggtgaattttatggtggttaaattatatctccataaaccttttaaaacaaaatagaaaaacactttgttacctctggtcaagaagagctgaagggtctttcctgttcttacctattgaggctgcccaggaaccagcccctctccctcctgtccctctggccagcactctttccacaaagagaagcccccgaccctgagccgacctgttttctttttctaacctgatttgagctagcattttgcaaagcttcattctctggaggcaaaagtccaacttcttattcaccgtcaaaggtgtagaatctgggtcagcagaaaatgctttgttttttttcctgaggagtggggtcaacgaacaggtgtcaatacgacaaattagaaaggaggtcagggaggggcagagacacaccatctgcctcctggcttgggactgagaaggtgctcccattcacaaacctgctctagcaaaccactctgtccagggcgagcaggtcaggcaggtgagaactgattgagaacaggcgaaagggctgtgctcctggaagtgggagatttgcattctggggccgtggagggcagggggtgggcggctgcaggaaaccaagcaaagatcagggctgggctgcctgaggactggggctagacagagcagaagtctgggtggagctgtcagaaggcagaagtggggagagccatggattttacctgggtggactgaggagtctctcagagcaagacattttccccccaagaaggtattactctcttcccaccccccactccctgaaacacttttaattccagtataacttgcagaaagttctgcacaaatccttagtgtatagcgccatgcattttcacagagtttatgcaagtttaac[131 bp omitted]gaaaccccatctctaccaaaaatacaaaaattagccaggcatggtgacacgtgcctgtaatcccagctacttgggagactgaggtaggagaatcgcttgaaccccggaggtggaatttgcagtgagccaagattgtgccattgcactccagcctgggcaacagagcaagactccagctcggaaaaaaaaaaaaaaaaagagatggggcatttccagcaccacagaaagcctcttgtacccctatccactccccaccccacaagggtaaacactgtcttgatttcaacaccatgcactccttagttttgcctgtttatatagatggaatcagaagcatttgctcttctctgtgcagcctttttttttttttttttttctttttacagagtttctctcttgttgctcaggctggagtgcaatggcgctctgcaatcttgactcactgcaacttccacctcctgggttcaagcgattctcctgcctcagcctcccgagtagctgggattacaggcatgcaccaccacacccggctaattttgtatttttagtagagaaggggtttctccatgttggccgggctagtcttgaactcccaacctcaggtgatccaccctccttggcctatcaaagcactggggttacaggtgtgagccaccacgcccggccagtgtgcagcttcttttgctcaaccttctacctgtgaggttcacccaggttgctgtggtttcttcattctcacggcagggtggagtattccattgtgtgatgacaccacacattatttatccatttaacagtttctaagtgtctgggtgtcttccagtttggggctatcatggatagggctgcaatgaacattcattcgggtggctgtctttgggtgaacacatggatgcatttctggtgggggtggagttgcccggtcataaggtatgtgcatgttcaccttgagtagatactgcatagcagcgcagtccacccaaagcgggtagacaaatttgcaatgccattggcagtgtgatgggagacacagaaagagagagttatgctctagtcctccctctaagagcgaataggcactgaatactttatgagatgaattgcgtctcccccaaatactcatacattgaagccctcactgccagtacctcagaaggtgactgcatttggagatagggctttctaagagttaagtaagttaaaatgaggccttgagggtggtccctaatccaatccaactggtgtccttataagaagaggagattcctgttatcctggcactttgagaggctgaggtgagtagatcacctgaggtcaggagttcgagaccagcctggccaacacggcaaaaccatgtatctactaaaaatacaaaaattagctgggtgtggtggtgcaagcctgtaatcccagctactcgggaggctgaggtaggagaatcacttgaacctgggaggtggaggttgccatgagccgagattgcacgactgccctccagtctcggcaacagagcgagactctatctcaaaaaaaaaaaaaaaaaaaagaagaggagagacagcaggcgtgagctcacataggggaaagacctgtgaggacatggtgaagaggaggctggagggcagtcatctgtaagccaaggggagagacattcagaagaaacaaccctgctgacacctccaccttggacttccagcctccagaactgtgaaaaataaacttctgttgcttcagccaccctgcctgtggtattttgtcaaggcagccctagcagactaatacaaggactttctttgtgctgggctctgtgcttagctcatgctttatctcactgaatccccatatcaaccctgtagggtaggaacaatggtgacctcagtgttacaggtggaggactgagcttggaggtaaatgacttgcccagggtcagaacacaggcagcagcctgagccaggactggaactcagggctgcctgtccagagcccttgaactgaaccgtcatgcccacctcactcatctgctaggtcgttcatggcccactcccagcccctggttatttgaataatggccgtattaggttttgcagtttagtgtaaagaagggagagtgtgcttgggaggcagaagatctgggcttgaatcctgggtttttgacctcctgctgagtaaatttgggccccactgcttagattttatatgtctctatctcctcacctacaaggccttcgtcacaggctgattccggatatccaatgtgttgatgtatgggaggtgcattgtaaactgtaaagtgctgggcagatggtaattgtttcagagatttcatgagtcatgctatgcatttagcatgggctgaattgtgtcctcctgcccccagttcgtttgtcagcaatctaacccctaatgtgatggtatttggagatgggacctttgggagataattagggttagatgaggtcatgtgagtggagatctgctgtgacaggattaatgttcttataacaagagacaccagacagctggctctcttgccttggggggatacaacaagaggacggaatgtctgcaaaccaggaagagagccctcactgggatgcaattggctggcaccttaatcttggattttccagcctctagaattgtgcaaaataaatgtctgttgttgaagccacctagcctttggtattttgctatggcagcttgagctgacgaagacagcgtgctgcccctctttctctttgcaaagcttcatagacatacatggcctatacactgaaaaaactcacattcctgaggggctaactgttcggtaggtgtcagttctggggctgggctgggtgacgggttcctccagtggaaaacatgcagtagccatgtgtctgctctggggctggtgtttggtgaaggaagccgatgtttctttttcttgtttgtctcatgccaggactgtgaactgctcttgttgtggagactccagggtagaaaggagaggatggggtagggacccaggtacaggaaagggacagcagaagtgcttttcatttggtgcagatgctcagagaggaaggttttgctgttatccccattttacagctggggggactcaagctcagagacttactcaacaatgctttactaatatgtcataggaaccaggactgaagctgaaggcctctggatttggggtcagttgattacttggtattagtctgggtaggctagattatgctgcagtaacaagcaacaacaacacccagatcttttgttgtcttacagcgacacaactttttctcactcatgccacatccatcctagtggctggtgctgctgccccttatctcgtcactccgagtccaggccagcagagtggccaccaactccaatatggatggatctcccaagggtctcacactggcaattcaatgccccaacccagaagtgacgttcatcatttccactcaaattcactgaccggagttagttattggccagagttagtctagttattctagctccccagctgaatgcacagggggctagaatattcaccctggtgtgcccagcaggcagagggggcaagtattatgggggcagcattaatgcccatgtcagaatgcatgcgtgcatgcatgaatgaatgcacttagaatctccatctgagtttagtggttattgacggacccaggaaaagacagcatagacttgcaactgctccactttaagggcattggaactccttgggtcctaataataggtttaagcatcttgaaaatgtatgcgtgttttttcctctccatcgtttccagctcccctgcctacatgtcctctctttcaccaaatctgtttgccatttactgtggatgacagagccaccccacccacacaggccccattctgaggttgattgataacccttggacacacacagatggacacacagagaaatttctactccttccacgcgccttgggcagccgtggagacagtaatttttcaagtaagtgttagctcagagtctttcgcgggctccagagcataactaaacccagacagactctgggagatgaaaaataaaccgttgtttttatgatgccatgaaaaagctttctttttcctcctagaaaagaaacttatttattttcatgtgtgtatgggtttgcagtaagtgtggaaggattaagcctttgaaactgtcgatttatatccatgagtgatgtgaagtctttgtcctggagagcagcaagctttccaaattggaaaatcgagagtcgggcccctttgctcattcactcagcggctcattcactaaatatttactgagcatctcttgccttccaggcctggcttcaggagctggggacgcagagcccatgtcagagggcaccatccctgcccttagggagtttgcaatctacaggggaaataaatgccagaggcctgtacaaagggtgtggggtactgagcaggaccggggagctttgtcaagtagcatggaggaacttaacctggaaggacaaggaggaaccagccagccaaggaggacaaagagggaagattctgacggaaggaatggcatcgtcagatgaggggaggtgggcgaggctgcagtgtagttgggcttcaccaggtaggtcatgtagtagaggagataagcctctgggctccgggttcaaatcccagccttgccccttccttgctatgcgaccatctataaaatggggagagaagctgtaactccctcactgggtattgtgaagagtcgatgggttgaaatgcataaggaggccagagcagtgcctggagtgccaaaaattgcttagtagctgtgacctgttctcattttgctgaggcttgagtagaaaagaagaggaagaaggaaaaggtgggcaaggacctgaatgtcagggtgaggggctgaggctctgactcgtacttgcagtgtccagggatgcaaaggatgtgtggattttgggggcctgttctgccctagggaggaagcccaactgggtggtcctgagagagactctacattaagggtagagttacgcactggaagcctgggggctcagcgggggaggtcccacagggtcagtcagaggaggggctgagggggaggtcccatggggtcagtcagaggaggtgtggcccaagtcatggggtctgcagaagagagacccttagacaagaggatgggtggttctgaaggacccacaccagaacccccctgctgggtgcccagtggagggtgaagagtgcagaggagaagtgggcactgggcctctgcatggcatgagtgaggggcccctctggctctagagtaagactagcttgaacccaaagcccaggctgagcccgataagctgagcccccataatgggggtgatgacacccatcgttcaggggtgttttgtgagttaaatgtctctctttgtccttatggatcttagaacatgggggtgcagtgcaggtaaagaggattaaatacggattgacacgtggtctgtgggaacacagagagggggtggctgactggcagtcaatcaggaagacttcctggaagaacgggccttctgagaggctgagattcacaggatgactagaagttggtatccaggtgaagagaagcagggagagggctccaggtgaggagatgacatgggtaaggcctggaggtgagtgaggtgagtgaggtgtcacaggattgagacactgcagggtgttcagtgttgccagagcaaggagtgcagagatgagtgttctgagacagggaagagtgagtgggtccagcagagagactcaagtggccttcagagaaggctaattgggaaaggtgagtcctcctggagtcagaagacctggcttcaaggctgcactgggtcacttcttggctgtgtgccccagacacttcgctttacctctctgcatctgtttccatccctataaattaggtttcatgtgaggacagagacggaatgtactcattcattcaagcagatatttactgagtggctgctataggccaggtgctattctaagcactggggattattcagaatatggggaagatcaagtctctgccctcatggggcttacactttagcagggaacacctcataagtgcaatgaagaaaaatcaagcagggtaggggccagagggtggcagggtacagtggggttgggggttggatgggatggtcagggaaggcttctcagaggagggcacctttgaacaaatgacaagggggagtgagctgtgtgggattcatgggaaataaacattacagcagatccctcggtagatgtactaagtacaggaagtgctctgaaacctttgcctggattaattcattccacccttgaacaccatgagagccaagcaccattatcattacaccccattacaggtggcaaaacggaggcacggagttaggtggcttggccaggtctcaggatttgaacctcatggcatggcctgcacagccacaatcctaaccactctcaccatgtcccagacaggcagggccggataagctcagtcccaagccgggcttaccgtgggggatggtgtgtgcagattgcagagtgcaaggcaaatgtgaaatgttgtcaccgacattttctttggaatgtgaaggaaacatctcaaaccagtggcatgctatccacttctgccaatattcccttctccttctccctctccctctccctctcctcctccttgttttttgagacaaggtcttgctctgttacccaggttggagtgcagtggtgtagtcactgcagcctctacctcctgggcgcaagagatcttcctacctcagcctccagagtagctgggatcacaggcatgtgccaccacgcctggctaatgtttggattttttgtagagatgcagtctcactatgttgcccaggttggtcttgaactcctgggcttaagcaatcctcccacctcagccccccaaagtgttgggattacaggcatgagccaccacaccgggccctcttttgctgatatccttaaaaataaaggcctgtgggcctcagtttcctgtgtggttcttggcagagtatatgaaaacacaacttgcttagggcgggaaaaattctgaaaaacaaaagaaatacctgcgtttgctctttgcaatatatccacatacggaaaatacgaaaaatagagaaaagaagagaaatttctcacatacgtaccacttaaatataagcacttagtattttggaatgttttctgtttactctttttcaaaaggagagggtgtttcagttgtgtgaagcagaaaataaagaacttagaggttttggaatatatagacaattatatagtgttattatgtgacaagaaaactttggctaggccatgcacggtggtgactcatgcctgtaattccagcacttgagcccaggagttcgagatcggcctgggcaacacgaggagaccctgtcactacaaaaaataaaacacctagctgggcatcgtggtaggtgcctgtagttccggctactcagaaagctgagatgggaggatcttttgagctcagggggtgacggtttcagggagctgagattacaccattgcattccagcctgggtgacagagcaagaccctgtctcaaaaaaataaaaaaagaaaaaagaaaatttagaataatgcaatacccattttacttttctattctccaaaatattagcttttgcaaacagctcagggcagcaggtagagctctgtggcagatcactagagaccaggtttctgattggtcagttctctctgagattacctgtttgccagcttgatggtcacctaaccggactgtcacctggttccatggtcaccaagcgttttagttgctcccccatctttgtatgagagaatgctcataatttttgagcaccctgtcttaaaacaggcacatttatttataaatcatactattaccaatctgcagaatattagtacattcctaaactatgttaatatttaacacatagtttaatttcttatttttatataaaaatataaatgttctaatattttcctcccacactatttactggtttgctcacaccccattgatttaatccattttgcccagtccagagacagttttgtagacagacatgatatcttgtgaaaaagggtgaaaaaatgtgtcatttcacaccaaatcccactgtaggaacctctgatggggtgggcacagtctatctcagtgggaaaataaatcctgatcttccacttacaaggtcagggagggagaaggggaagaatgaaatttcaagaccaggctctatgtggatggaggactcctgcagaggccacagtcatgccattttttgcctctttggcctgaaagggcaagcgctgggtcctgacggggctaggactgaatgcttggcataataaagtgagaggaggtgcactgaatggagggtgaataatattccattagtattaagtaattaattaattacatccaataatatcccatcatatgtattaaccacattttctttatccgttcattggataaagatggacacttgagttgcttcttttttttttttgagaccgagtctcgctctgttgcccaggttggagtggagtagcgcatgggagttaaaatgtgatgaagcccggcgtggtgcctcacacctgtaatcccagcaccctgggaggctg[132 bp omitted]tgaggcaggagaatcgcttgaacctgggaggtggaggttgcagtgagctgagatcactccactgcaccccagcctgagtcacacgagtaaaattctgtctcaaaaaaaaaaaaattgtgatgagatagaggcactggaggttaggagcttgggcgctggtgcctggctgccatagttagtgtcctagctctgtgtcctcgggcaagttacttcgcctctctgtgccccattcccatcatctgttaaatggggttaataatttctacctcacagggggttgtgaggagtggatggtctaatacgcacaaagcactctgaacagcttaataaatgttagctgttacttttgagacgaacgccagccggaatttgaagctacaatgcagagttgaaagtaatccccagactttgagcccctgagaactcagagacatcttaggattcagtgcttgggccaatcttattccaatgtgaaaggacagggtgacctcagctgaccagcccaattgctgtggtgactgggatttggttctcacctcccagcctgggttttgttttctaatatgatgaggccccaatgctgtcatctcgagagcaggaagagagagttttgctcttcttgtttagtgccaaccaggctcccccaaccatagaaatccccagaggactcttccatcaaagtgaatattcataaagtgctttagagttgacagagtccctttatatccattatcttatttgatgaccccaataatattatgacccttctatttgctggggcactgaggggagtgagagtcggggagagaggtgggaggggaagggaggagggagaagagaggaaaggagaggggaagggaggggtaaaagtaatgctgaaatgttgagactggcttttatttttatttttcattttttcaacagtagagatggggtcttgctatgttggccagggtagtcttgaactcctggactcgagcaattgtcttgcctcagcctctaaaaatgctgagattacaggccaccacaccctgacaactctcttattttgattttattatatttatttttgtttttaataagaacctgggtctttttgactcaaatatccatgtgcttctgctttaccagctggccttcaggtgggagaagcaggccctctgtgtgcccagcctgggttcagtcactgactcagtgcccagcacaaggtgggtggctcccccaggggcccttgctaccctcaccatgagccacgctgagctacagatctgatgcctgggtctccgccaagggctcgggctaacacgccctgtttggactcagccaggtgacccatgatggtaacagccggcttgccggcctcgccttccttgcaagaagttatggaataacatcagagctttttgaggcaggtgttaatcatgtccccattttaccggtgaggacgctgagacttggagaagctcccatctgtgagtaagtgttggagccaggtctgtctgacctcgaagttgaacttccactctccactctgagaagaagcgtgcttagggaggcgctgcttgtagaaaaggatcctggagaactattcatttgtcatcactcaggccaagagagtaacagaagaaatgatcaatgaaaaaccctccaaaagttgtcatcggcttgggtttatcctgctttaaatcataacttaagcagcctgaaatggtatttcccaaagatgggaatgaaattctggttattcaaggaagaagccaagggctgggggtttgcaggagcagtttccagactcccaggagtgcaggtaagctctgaagaggcggaagggaggaagggaagagcaggggaggaggaggggctggagcccaacgagagagggaggggcctgtctaagcccatactgcactggggacagctcttcccctggggcaacgacaggctcttaccatcagccttttcccaagatgccccggggcacagttaagtgctttaagtggcagctccgcaaaaggccatctcccgccaagactataaaatggaaaaatggtgatgctatattcacggcaaagaatcaagcgagcagagccttaacaaggaatttataaatcagttactaggaacattaaaatgcctcttgctgcacttaatctccagcttcctttcttcttccaaatacctaacacatcagtcttttttactggctctggtggacccttcaaggaagtctgttcctttttcagaataaatatatgtgtattctcttgtctgactcaactcgactgtaaaacaaataatgatacgtgcttactctggttcttcagataaatatgagaggaggcagttttgtctttctttggtctgggacatccctgggagcaggaatcatggctgtgccaagcacagtttctgtagctgcatcccatgcgatcctgtaagtaggcacacttggaatgtaacgccagcaacgcgtggtctagacatagtcaagcttggcccaataaaaacaggagaaccaaactgcactccaaggcattccccaagactcttgtataataagaacagccaacgcttccatgagcctaccttaggccaactgctgtcctaagcacattgcgtttatcaactccatttatcttcacaataaccctagtactgttatgttctccatattatagatgaggaaacagaggcacagagatattaactttcccactttcatacaaccagtgactgggggagttggcctgtggacccaggcagcctgacccagcaacagggctcataaactttgtgctatatggctgtaacaagaaggctagttttaccatttaccctatgatatgatcaggctttgtgtccccacccaaatctcatcttgaactacaatccccacaattcccataatccccatgtgtcaagggagagaccaggtggaggtaattggatcatgggcgtggtttcccctgtgctgttctcacgatagtgaattctcaagagatcggatggttttataaggggctcttccccctttgcttggcatttctcctccctgctgtcttatgaagaaggtaccttgcttccccttcaccttctgccataattgtaagttttctgaggcctccccagctatgattgtaagtttcctgaggcctccccagacatgatgagctgtgagtcaaccaaacctctttcctttatcaattacccggtctcaggcagttctttataggagtataaaaacagacgaatataccctcgttctgggaggattcagggacccaggctgcaatgagagggcagagctgctgggagccaccaatttggttattcccaggatgtctgtttgctgggctggtatgttgtgggttgtttttgtaatctccaccttaaagcacatttggtcaagtcttatgagaggcttccgctggagctgtttaagtggtggcagctgaggcaggcccctgtcactcagggaaggcagccctgtgaaggacgcctgggtctggagatctgcaagggagagactttctcctggagaactttggggaagcttggctcagtaaagaggaggcaaggtggcctgaacacagacactgggctgaggtacatctctaagatgactgtgtgtgaccaggaagtgcttctgatcctggatacctggtgatattccagctggtgaatgtagcatcccagcctgaatttcagcatttgggtcctccttgagagattctgagaatctccttgccaatatctgtttctggtccttgcagacatccagacactgctggacttagtcactcactctatagaccagctgtctctttcatgcctttctgatattggtccaaagggggccccaatgtctcccttctggcctacccccgcccccatgcacctgcccaggcttctggaatattgaggctcagcatgaacccagtgccctggagcccccttgtcttgagggggcaatggacagtcctgctctatcatccttagtgtgaattcctgacctctttgagcttagttggaattgtaagcatgggctttcttcattttccataggtgtggccgtgaggctgcactggcactaggccaaacttcaccaggacaatcatgtccaccacaatggggcagcaggaattctgtgtggccagtgagggaggtgtattatagaggcccatggtgaaatccagatgatttcacctgtagagtctcttctcaccgtgagattccataatttagaatggaaatctaaagggagattgtagatgaaagactacagctagtgagttagatgacaacctccagctcaacagctgagttgtgagcaaggaaaaagaaaatagtgaagccagggagccaatgtgggttccctgagaaaaagtcatacccaaggatttccctgagagaattattagcccattctagcatgaaaacactctaaaacaatctcatagctagaaaatatttcctggttttcaaggcattttcctttactattattttcccccctctttcataacagccttgggaaataggcagggaagtataacatgcccattttacagacaaggaaacagaaagaaaatgggatttaccccggagcacgcagctaagttatgcaatgtagactcaaattgatctcttctatctctgctttgggaccctttctataactctgcatgctgtattttgatttttgcaaaacacttgacaatgggcatgatctccttgaggaccagagggagaagcattcccgatgtgatgaataagcatggtgggttaaacatggaggcccatttgatggctataagcctgtttgatggctgaatgaagagctctctggtgcacacctgccacagcccttttgtccgggacgacttccatgagacacggcagtgtttgtcagacttcttgatgacacagtgctggaaaggacagctaatccactagttgggagaactgagtagaaaataattgagaatatttgatgtattggagagggcataggctgtggaatcagaccagctgcagaaccttgggcaaattacttaaggaaagcagatgctcatttaatgctccttccccttcctttcttccttcaggcaaagaagaggcaggattgctgtctcccaatgtgtgaagctccatcttaataaagcaggtgctgcctgtgtcaataccctggtggctaccagctcagcccctggaaactgactgccttggttcctttcctggttccactacatgctagttgtgagatcttgggcaagctacaccctctctcagcacctgtcctgtaaaatggagacaacgacagcacccatctcacaggattatcgctagaaagcactcacagtggtagccagcacccaacacgtactatgacaaatttccattgttgtcgttatcatcctgtgacccctaaaggtaaaatggagctgaacgctgtaacttacagaaagtggggtttttatttgtgtaggggagaactttttgcctcactcccctgctgaacacttttcaattccacttcattacccttaggagaaaggcagaaatctttaacgtgacccccacggtcctgctcatgcggcccttgacttgtaacagtgaaactgcctatgcaaaatgatgactgagacggtgaaagaaatctatcttaactgactctgttttgcttctaacctccaagctgtccttgttcattcctgggcgtaggctgaactaactttgggagaaactttatagtttacagtttaaacaaagacagtaacagcctttcccaaaacagatctccttctggtctggggactagactgtctttgtaggactaacaagtgtcacattagaaatgtgccaagattagaaacataagcaaagattagagattatggttttggagtcatgcagctggaggctacaagattctgaccctccctaaactgctcctaagatcagtgcttgagacgttttgccgaccctgcacttgatggatcagctggtaccacccagatcaataaactggctcatctgatcttgtggcccccacccgggaactgactgagcacaagaagacagctccaactccctatgatttcacctctgaccaatcaacagtcctggctctcttccttctccccgcccaccaacttatccttaaaaactctgctccccgaatgctccgaagactgatttgagtaataatagaactctggtctcctgcacagccagctctgcatgaattactctttctctattgcaattcctctgtcttgatgaattggctctgtccaggcagtgggcaaggtgaaccccttgggtggttacaacaggcttatcttgcactccttggtcccttgctcactgtactccatctgtcatcctttggaatttcttgtatgcacaatgccccctgcctctagcctcagggcctttgcacatgcagtttcttctgcccagaacaatcttctatcttcctcctggccaatctctgccaacccttcaattttcaacttaagtatcatttccttagagaaacttttccagatcttctaagtgaggccagtcctccttcttatatatcctcatagtatcctattctctgtagcagttaccacagtcataattttttcatataattatttaatgtctacttctaatggtaccagaaacaacccttgccttactcactgctatactctcagctcccagcacagtgcctggcactgataggcagcaggaaacatttgggggtttaatgaatacattttctcaccagctttgctgggcagggctgcctttaggggccatgaggtgcacatccccggagatgtacaaccaaagccagggacatggtgagctgaagaagcactcaggtgaatgaggcctctctgcttcctccagggagaattcattgccactaaccttcaagctctgaggctgcaaaatttgcaagacaacagctgagactgatgggggctgagattagattattccttcagggaggggtatcacctcctgggggaaaagggaagggggtggacacccccaagtgggatgggggaaaggaatagctgcaagaaaagaaggagggggggccctggaggactagcacaaaggccggatttagccgctgtgcaggtcaacatccctgagtctacaccaataggaaccccttccctctcctcctctccagctgcctctgccctctgcactcacaaagcctcagagcaatcgcccaacccatatggtaaaatattcatcgggatgcaaggcaaggcaagagactgaggcagtgtcagaagagggggtggggtttcctggctgagaggtcctgggtgcatcttctttgggcagcgagccacgatgttctctgcttgggagctgcgtgagggtcacagcttgggcacagctaaactcctgaggctagcacaaatgtatttaacattccaccaacgtccagctactggggactcctgcattatttatttatttttgtactaatggcctgaaacgtctacagagcagctcttggatagcatggtgactagaaacccaggccccttgctccgcatcttctgcagtgtgagcagagttcatggtcttgggtcccactgactagccctgggtctggaatcacaggcagcattggggtgattttcctccttgccaagacacagatccctctgaggagcgcccggttatttttgagtcttctgtgctcaatcttatccctcatttccaggaactgcattggcacccgaggctcttgcaagtggcaatttactagaacaaaataaaatccctagtcagatttaaaagcaatgaaataaatagaattgcatttttcacttggcgtcaagacggtggagacacacccacgtacaacttgaaagcaccttgtttgcttccttttaaagagaggcggctgatcaatcagccgctttcatttaaactcagggacaggggaaaagacagaaagcaaaagccccttttctccttcctggagtctgaaaccaactgttcctatttcttaaatctgtggacttcccctcccatcctctgaaccttttccctactttttctcaggatatattccacaggaattgaacatctggcaacacaggtttccatggaaaagacagcaggctgggctttgttctcacccacagctgatggagatgtgcctttcacatggcagtagggagccactgttagccacagcaggctggcgctcagagcccagcaggtcatggcagcgctgggagctgcctctgtcttctagctctttccttttttgctgcacttttccacatgctgactttcccccagacttggctttatcctgccaggacatagagaatggtcttggagcttccctgattctttccaatgtctccagtctctgctccaactccatgtggtactgcctacctctacatgacctggaatattatttcagctctgttcattgatgactttagggaggtggccaggctctgcccatcagtaggaccaaagtggccattttctcatctgggacccagagagatgggggtggggtgccttggagatggtagagtccagctgaagaccctcaggcccagagagactcaatagctggcccaaggtcacacagccagttagacattggacctcccggtactcactcaggtgctctgtccagtgctccataaagcctgagatctgagttggcccttctgaaccatgtccttggcaggggaggcagaatgagatatctggcagagctgagctctgtggcagaatgacaaatgggccccttgtattgctaggaagtgggttctgggaacaagggcagccaacagagccatttatccacctcccagtcagtgactcggccagcagtggagaagtcagagagaacaggggggtgtaaaggctatgggttctctaactcattactggcagggactgccatccagggctgaccagcacttcaaacgtgaggcctgttgtcctaaagaccagggccaggtgaagaacatccttttaatataaattgcacttaaattcagtgcttctcaatttatgttaattgcaaatcgaagtcttgcaatttcacatgtgtatacatatacctatatttaattttttaaacagcatagtatacaggatgttctaagacaggagttttcaaatgtagatgatagaaaaataattttttagggagcatttggcaagcgttatcaaaactttaaaatatttatactctttgtcttaggaattccatttctagaaatacagcctaggaaaataatcagagatagagacaataatgtttgttacagcattaaattagatctaatcttaatatcccaccattaagacaatggtagagtgtagtatatccatttggtaaattattatgaatcattcaaaaatgatgtaaagaattctaatgaaataagaaaatgcttatgatataatgtcaaacaaaaaagtagggtatacaactgcatgtacatatgtttcaaccattaaatctatatgtttatttctctttctccacataatcttagaaagaagggtaagaaaaaaaccatgggaagtgtatatagtgttttccctctcaaaggaggtgatttgggtgatttttaaacaccttcctcaatttttcatactgtgagtgtgtgtgtttaggattgcacacacatagcagaggttttatctgggctggagctgagatttgggtatctctgatgggtggaggtgacaacctctctctctcagatatgtttacctccattgatctctaggggccggcagactgtccttgactggtgctatgatttgaatgtgtgccccagatttcatgtgttgaaaacttaatccccaaattcatatgttgattaggagtgggagctttgggaggtaattaggattagataagggcatcagagtgaagctgctgggatgggactggaggctttataagaaaaggaatggagacctgagctggcatgctcttgccctcttgccatgtgataacttcagccttgttatgacaaagcatgaaggtccctacaagatgctggtgccgtgtacttggacttcccagcctccagaaccatgagctaaatgaacttcttttttagaaaaataaatcacccagtctgtggtattctgttatagcaatagcaacagaaaacagactaagacaacgggaacacaggcatttatggatgtgcttagcaagcctgggttggggccccagctccttctatccatgtaaatggcaaggggcccaggacaaagggagcagagcaaacaatgctcagaaagggggcctgggagtcagaggagggcttgttctgagaaacaacataatggctgctgcttgaaagtcctcccttgctacctgttgacccaatcgccatggcaacttgtgtttactctgggaagagttgctattgtcaaaaagagagctataactcccaagggcccaagcaacccttggggagcccatctaggtgtatgaagttagtggtgagggagcgtgtctgcagccactctgcagtggcgattatggagcaagaacaggggagcatcccgggggatctgcgcctggggcagtggagaagtgggcagcagacttggctcagtggcaacagcagaaagtgtgggaagaacagggtgttgtgctggagaccaggatcccagtggaaattgagactgagagaggaagacagagggagggaactaggggaaacagtcttggggcttgatgctgtgacttcatatgtgtcatttgggttacaaatatgaatatgggatagtagggggatggttcagctgcctcaacctgtctttgtaacagtcatggcattctgcatagtgaaaagatcagaatggagcaggagtttataagctcaaattcatcttgcagacatgtttcacgaaggtcaaaaattgggtacctttaggcaggtcctaccttctaattgccatgcaccccaccccttcctactgtctcacacctggcccagttcacttattgctatcacttgcctaagccctggaggtatgtgagtttgcagcctgtgggtggatgtcctccaagggcctttccagctctcatgttacaaagtggctttgcagccctcgtctcacttgccgtcctccatcccaccccctcatatccagagctcccctaagaaccactcccccttctccatgcacatctgcctcatgcctgccttgcttaggctgccctacctgcctgcaagcccttccactctggagacctccaacttgtcttccaagtctccattcagggttctccagcttcatgatgtcttttccttgtcccctctgatgcagtctgagcactcctgtctttgtgtcctcactttggccagacactgtgatggcttttgtccttgtctcccttggctgctagccttggagcagcatggggcctacgctctgctcatctcccagtttttggtgcctagcatggtgctataggagggaaggtattacatctccgtacactgctgagtaatcaggcactggctcagagaggttcaccatgttgtccagggtcacacagctaatgagataagcagagttagtaccagaattcaggtcttcttccttgaagtgtccactgggctttctctgcaccaggtatcacaacttgcagggaaaacccaggatgctttaatcatttgaaatgaaccaggcaatagattagtgatgagaaataatggatatggctgatctatctgtctgtctgtctaacatatatatgagatatatgtcaatatatatactccacagagatgaccgagtgggtgctattcagaaaacacatcggagttagtcctttccccagaaagttgacctccactcttgggcatcctcttctggatcgaggaaggtcctgttgggtaaggactcccaaagcatcagctgagtacactggcattgttccatgtcagggtgtggatggaagaatgcctgtttagtcatgtgggctctgcagccacagttcaaatcccagctctgcaacttatgagctgtgtgaccctggataaatgagctaacccttctgtgccgcagtttccttatttataaccaactcatggtgatagtttctagcctcttgaggcattgagaggattgatgctgtgacctcatatgtatcatttgggttacaaatatgaatatgggatggcaggggggtggtccatctggcctcaacctgtctttgtaacagtcgtgacattctgcatatatatactcccatatacatgagaggattaaatgagttaacccgtgtaaagcacacagtgagccctaatgtgagtgcctctgccattaatattgtcagtttgtctgtgagtgggcaagagggcctggcactagaaatcaggggacgtggccctggtctggctctgcctttggctatccttccccaactctcctgcagggggcaggatgggtgggttccatgttcttggggatttttgcaattcctttgcccctgcagcactcttctctgtggcttctgcaactgctttgggacgaagcctcttgagtagatgaaagggagtgggaagttgagagcatccccgctccctgccacctcctgcgtcttcttaatgagctgccactatctctgtggggtgtggggtcgtgctagctcccatctggagggaggctggctctgaccttgctctccaggtgccagctcacctccagggaggtagtttcccgaatgctgaccccaggccaggccctgtcctccagggactcaaagtcactttacacttcagggcagcgagtgcagtgcaggccaagcacaggggactgggtgatcccagccaggaggggaggggctcaaggagagggtcgggaggaggtgacccgggaatactgaaggtccagtaggaggtgattagagggttaagggtgagcattccaggaagacaatggcctgggctgaggccacagaggaacaagctagccatgttcagttgttcagcgggctagggtggaaaatggccagattccaacctcctagcctgggaggatcacttctgggagggagaacctaggccccggccaggattcctgtggtcagtttgggctgaggaaggtgggatgctgagcccattgcttctctggttttaagcccttttcagtgtatcttggaaaagaaaacacacctcttcttctgtgcctcttcttcctgggggcagggggtaggcttaaaagtggcattaaacaccttattcccaaagccctgggatgtcaatgatggggttccctgatgagctcctgggtgttgctcaccttcatgccagcctcccggccttcctgcattatgaaggaagctccagaagcccagctttggccagctgcaaagccagtgggggcccagtgctgggaggccatatggggagctgggcagaggggtaccttggccgacctagggacttcaagctggtccctgagctaagcaattgcgcggcggtgctcagggcaggcctgcctttctgggccttcagacttcccaccatctgcttagtgaggccctctgtttaaattctctacttgtctcggcttccacaaaataattagcatctattcgttcctagagcttgcttggcgacattagtcattgtaggagctttcagtgcggcttgcagaaatttccatttgatgcaaagttgaaaatggcttaagtgggactccacgggccccacttactttaccagcatctggtgccttggtttgtttcctcctacctgcttctttgctgccttctgagcaggtgtggggcctgatgatgacaaagggagaggagggcactcagacaagagaggatgctgtcctcctgggacaccgtggggaaggagactcacaaggaaaacccatctggggtgggagagggaggaggaggtttttagtgctgcagccacctaggcccttcccgcagggacagagcttttgtaagggagcgatttatgtgttgagctgcaaaggaggccacataaacccaatcccggttcaggcatgaaatccgctgcagaacaattctctgacatatttgcttacaaaactaacatgcacgattgcagaacaacctgctctctgaggcatgagtggctcaaagccctttggcttttcttgaaagcagtgctttggctctcatgagaacccagctgctctagcgttggtcagtttacatattcctgagccagagaaagggagaaggtgctgcctcctggcggtcctgtggggaatgaatgtggggcaagccagttcctgaaatcatgcttcacactccctgggctgcaaaatgctttccttccatcaaccctctcaggtggatgttaaggtcttatctgagccaatggggagatggacattcagggagaggaagggccatgctttgtgattctggcctttctttgcctatctgtaaaatgatctggttgtctgtaatcccagcactttgggaggccgagacgggcagatcacctgaggtcaggagttcgagaccagcctggccaacatggtgaaaccttgtctctactaaaaaatacaaaaattagcaaggcttggtggtgggcacctgtggttccagctactagggaagctgaggcaggaggattgcttcaatccaggaggcagaggttgcagtgagctgagatcgtgctactgtactccagcctgggcaacagagtgagaccctgtctcaaaaaaaaaaaaaaaaaaaaaggacctggttggacaaagcaatctctgagggctgtccacatttagtctctcccttgtggtgtgcattgggcctgaggggttttacccctatggcggtccacagggggaccctgccctggtcagtggcccatgcagcaagacgcatggtgctgtgcgacgctttgggtctgcagtgtaagacagatctgggtccaagccctggcctggccctgttttagctgtccggtctatggcaagttggcttccctggctggatcttggttttcttctcatccacaaagtggggtcagctccctcttctgcctgccttatgcctcactccagtgtgagtgtcaaagaagagaatcaatatggaaatgccttgtggatgaaaaggtggtgtttgattttcttttgcaaaacatgatatatgcaaattataccagaaatcaaatctcacaaaaagatgatgaaagataagcttcccttcctacctgtctcccacttcttctctctagatacaacctattattactccttgtgtgcgcttccttagagactttccatatgtccaatatatatgtgcaaagagtgacatctcaagtatttatacatccatctatctatctcacttagatgatttttaggacttttagaaatatccgttcagcaaatatccactttccttctcttcctcccaggaaaatgctccctggccccattggtattggacttggccatgacttactctggctaatgggatatgaaccagtgtgacatgaacaaagatttgaaatatagttggtagaaatctcctctagtgcttctgccatgaccatgagaggaataagccctagctagctggctgatcccagaagaatgagagctgtggattggagccactccagcctatctgtgggagtgtagaagaaaaagaaaactgtcccaactgactgcacacctttgagcctgaaaataatgcttattgttgtatgtcattgagttttggggatgtttgtcatgtagcaattgctaactgatacaatatatatgtttactttttttctaaactgtatgggaacatatatacaatattgtgcaccttgctttcttcacataatgtgtattggaaattgctctgtattggtacatgtacatgtctctcaattttaatggctgtataatattccatcttatagtatgttccttattgatggatgggtaggttgcttctgtcttttcctattataggttgaatatcccttatctgatgcttaggaccagaaatgttttggagttcagatttttttggattttggaatgtttgcattatgtacttactagttgagcatccctaatccagaaatctgaaatctgaaatatttcaatgagcatttacctttgagtgtcatgttggtactcaaaaagttttgaattttgaagcattaaatgatgattttggatttgggatgctcaacttgtacaacaatattgtaatgactcataattatattgcaggacaagtacctggaaggagaaattaccaggtcaaagagtatgttcaaaactgttgaaccaatttacactctcaccatccgtatatgacaactgttgtttccccacaatagggatattactttgaggatgcctctttactgcagcagaagttctgattcttgttctacagccccacagtcttcaaacctcaccatgaggtttcaaaaagcagtgttttcccagagtggtatgtgattttaggtggtaccagagacgatttttaaaaggtacacagaaaagatactaatgaacaatgaatcacgcagtgataaaatgattcactttccaaatctctactgctcctctgattccatcagggagaaagtcccagctggatgctgatgtattttaacacttctctagcagttgctaattttcccttgaactcagagccttcggtgggcagtagtacttagctttcactggattcattaaaaaaaattaatttgtttttaatggacaaataaaaactaaatatatttatcatgtacaatgtgatgttttgaaatgtatatgtggtggaatgactaaattgagttatttaacatacgcattacttcacatccttaccatttttttatggtaagaacacttaaaatctactgtcttagcataattttcaagaatacaatacatacttatggtcactatgttgtacaatagacctcttgaactcattcctcgtatttaactaacatgttgtatcctttgaccaatcctcatttcctggtaatcactgtattcattttttaccagttaattttatttactggctaatgttcctgatttttctttgttggagagtgattgcaaatttcctttgaaaataaatttatttcattacaaaaagcttgtgctcagatttatttactttttttttggaagtaatgttagacatacagaagggtggcaaaaatggtacagggcttcctatattcccttcactctgcttccaccagtgctaacaccttacataaccgcaggacaattatggaaaccagaaaattaacatcgatttgatactcttgactaatctacagaccttatttgaattttgccagttttcccactagtgtcctttttcttgtccagatctaatccaagatcccacattgcctttactagttgatatggtttgattgataggtctacactcaaatctcatgtcgaattgcaatccccagtgtttgaggtgggcctagtgggaggtaattggatcatggggtggatttccccctttggtgctgttcttgtgatagagttctcatgagatctggttgtttaaaactgtgcagcacctcctcctcctctctgttcctcctcctctggccatgtgaagatgtgcctgtttccccttcaccttctactatattgtaagtttcttgagaccccccagccatgcttcctgtacagcctgcagaaccatgagccaattaacctcttttctttataaatcacccagtctcagatatttctttgtaacagtgtgagagtggactaatacagtagtcccagctatttaatttcccccacattgtgacagttcttatgtctttatctttcatgatcttgataagtttgaagagaactggccagttattttgtagatcatcacttaacttgggtttgtctggtattttctcatgcataccacagaagtgatgttttgccattctcaatacatcttaggaagaggtacatgatgtcatatggcttaggtgacccatgcttggcagaggtttgggaaaaccttgcataggtggagacagtttgtggttgtcctctggtaacttctgtgatgtggatctgtgtctgggcaatagtcctcccgatcctggcctgccatgaggaggccgaccaccctctgcccttgtcaaaactcatggtgcagctctgaagtgtctatgatggaaaccagcaaccccatccccagcaccctgcttcctaacgttggtcctgaatggtgactgagctaagactctattgagctttcatttctgtgccttctgagacatgttcatgctggttcagatgaaaggtgcgagacagctctttggatttgatcttccctcagatgaaacattttaggctagaaaataaagacgtcccaggcaggtgggagtcagtgacacccttgatagaggcatctctgcagtttttcctttcaaccccaaaagagattttcccaactgatattgctcaccatctgttgccaagctattgctttgtttgactttctttcccttcatgttttggaaaatgttctgtgaaatcccaatctctcttccctctgtgatctgaagaaactctctctttcggcttcttccccacctacctctggaaagacactggagtcttggagcggctgctggctcctgggcagctggtgctagtttaggtctcagataatattgccctgaggagaaaagccaattaccttaagctaagactaattaactaccacagagggtgggatttctgaagaaaatgcctgactctccctacggtctgtttaatgagcggatggctccgcagggatgcctttgataatcccagggcctgaaacggatcccaccacacaactcacaactgaatctggatcccagcgtcacctctgcctaatttctgactcacatactgactggtttcatgtactgtcgaagttgatggatggaggtgagaaataatttttttatgttacttgtcaatatgagtcaattcctcctttttcctcttctgtgtgcaaagtcctggtttgggtaccaaaaagacatgggagacactatatcttaggcactgttattgctgctggggagacagcagtgaatgggctatagacacattgcttgtcctcttggagcttggaatttagtgggaatcccaggtagcttaactatgaagagggatgaaatttaggataaagtgctatgggagggaagaagaggagacttaatccagtttggggttgtggagccaatttcaaggtgaggcttgaacaatgggcaggaattatgcagctagaggagccagaggtgggtgggaagggaaggtgtgtttcaggcagaggcgccaaatgtggcacagagatgagaatagcacagtgaagttgaggaactgttgaagtcgaattggaacccagagttcaaagagaagagtggagacagatgagcaggaggagggttggcaggaaaggccttgtaagctcaagggtttgactctacttctaagagccaactattgtatatgagagggagggctcacatctccattttagttgacttggctgctttgttatagtccctttgcattgctataaaggaatacctgagaatgggtaatttataaagaaatggtgaagccccactaaaaatacaaaaaattagccagatggggtggtgggcacctgtaatcccagctactcgggaggctgaggcaggagaatcgcttgaacccaggagtcaaagtttgctgtgagctgagatcatgccattgcacttcagcctgggcaacaagagcaaaactccgtcttaaagaaaattataaagagaagaggtttattcggctcacaggtctgcaggttgtacactcatagtgctgggaaatgctcctggtgagggcctcaggaagtttacagtcatggtggaaggcgaaggggagccagtgtgttacatggtgatagagggagcaagagagagggaggaggtgttgggctcttttcaacaaccagatctaatgtgaattcatagagagagaagtcactcataactgcaagaacagcacaaaaccattcatgagggatctgcccccatgatccgaacacccactatgcccacctccaacacttgaggtcacatttcaacatgagatgtggagaggacacaacattccaatgatatcagctgctttagaaaagagaaggctggagacggggcagggagaacaatgggcagatattgtgcagttctagaaagaggggatagtgtcctggtctagggcaggatagagaggaagaagtggatggagagtagggtttttagtaacacttcccaccccaggagtaacagcatgttaaatacaatgggtctgagtcctaataggtgctacctttctttaccaacagaaagtgacatttctctgtggcaaagtcaatgttattgttcatcacacattgagttctaaccagaggaatatgggcagaactgatgtaagtcttttccaggattgagctaaaaacattccactcaaccctccaggcttcctgaatggtggttttctaagacagctggagcttgaatccctgaatccctacttggaggagcgaccccaggacaatgtcttatcttgtttcaagtcgtgataggaacaagaaaccaccgtgtgttagttaaatcactgaaattttgaggttggtaattatagaaactggcatttcttaccaggcctaccacaaaccagttgggctcatatttttcttagttctttcacggcattttggtggtttctaactctctgttcatccagagaagaggaattgttcagtgtggagaaggaaggaaaggcagtcatacagaaacagagatatatctacacacggatacatggggcccctcaaccaagatacccatacaggcccagaaaatcactcagtaataatgataaaacaataaaaccgaaattccttgaatgtcatggtctgtgctaatagttaattaaatcccacaacaaccctacgaagtagatactattatcattctctctctctctttttaatttttgagacaggaccttgctctgttgctcaggctgtagtgcagtggtgcaatcacagctcactgcagccttgatctcctgggatcaagtgatcctcccacctccgcctcctaagtagctgggactattgatgcatgccatcatgcctggctattttttaaattttatttttgtagagatgacgcctctctatgttgccagggcttgcttctctctctctctctctctctctctctctctctctctctctctctctctctctctttaacagatgggaaaactgagttcaagaggggatgagtaactttcccaaggccacataggatttagacccaggcatcccgactcaggagtctgtccttttagccacaactcacagacaagggcacggtgacagaggtctggggatggacacacatacacacaaacacacacacacgacagagacagagagtatctggattgtccttgtcctcagcatgaacaccattccgctttcaggagagagatggccagattgcagtggtgacaagaacagagcattgccgttactgaagacttactttaatgaaattctcagctggctcaggacattttgtttctctctagataacttcctgatgctatcacttttgcataccctgtttatttcacctgctccgtctctccctggcccaaaagggaggctctgttggtttgtttgatgttccttagatacaaatgatccttccctgaataacaaataggatgcacccttcagagggatttatgattcacctcttgttcctctagtttctaaatgagatacttccccagaaggtgctttttcccagttaacacctgaaactttgtcccagcagatgggttgtctgctgagcacacgggcttagtttttcagatcctgggcttgatgtgtcacccagactctggcctctgaaaccttaggctgcccagagtggagaagttgtcagcaatgagaacccctgcctcggcatatttgtgggtgtgaggagtagttcctgtgggaagttcctgggataacagtttctaggttgggctggtctcttcatccatcagttctagtcgctattgctgcaaaactgaggggtgtcatgcagccatttttattacatttacagattctgtaggttaggaatttggacaggacccagtggggatggtgtgtctctgccccatagtgtctggggcctctgctggaaagatttgaaggcaggtgttggcggcggggggagtcacttgatagctttgggctggagtcatctggagatgtcttcacttatatctggaggttgatatgatatataacatctgaagctgaccatcagacagagccagatggacggagcgcctctacttggcttccccatgtgatcgctctgcgtgcgctagtttgggatggtatacagcatagccatggggttttaagaggaagcatcccagccgggggcggtgggtcacacctggaatcccagcactttgggaggctgaggtgggtggatcacctgaggtcaggagctggagaccagcttggccaacgttgtgaaactccgtctctactaaaaatacaaaacgtagccgggcatgatggcactcgcctgtaatcccagctacttgggaggctgaggcaggagaatcacttgagcccaggaggtggaggttgcagtgagccgagatggcgccgttgtactccagcctgggcaacaagagcgaaacttcgtctcaaaaaacaaaacaaaacaaaaaaaattgcgacatagcactggaggttacataatgttacttctgccatgctgttttggctgagacagccacaaagtatttctaggtttaagggaagaggatactgatctcaccactcaatggggaagtggcaaggttagaagaggacgtgggaaaagcctctttgcagccaccttggagaatgtaactgatataccatttcacatgtgaatcccttccttgtagcccactgcatgcccttgcagcttccgctctcctatactcctatcatggggagttcactacttgttccagttaattttctttgagtgtaagcaacagaagcccactctggctaacttaagcaacgcaggatgtactgacacaaggtggggggtgttgaaggatggaagggaaggctgaagatccaggcttggcatgaaaaacgaccagggcagtgcaagaagaagtcttgttcagtcacgcctgggggataaattccaaaccatatttgaaacttttagtcattctgttcaaaatttaaatcacgaggcgagaagatctgaatggccctgtgctacgaactttaccacttactacttacttgactctgggaaggttgtttcactgctttgtgactcagtttcctcatctgtaaaatggggacactcatagcagctacttcatagtttatgtgagacttaaataagatggtggttacaaagtggttagcccaaagtctagcacatggtaaatcttcaattaatattagctaacaactgcaacaataacaacaactgctactgttactgcaatgactatttttactattattatttttgagatggtgtctcactctgttgcccaggctggagtgcagtggcataatcttggctcactgcaacctccgtctcctgggttcaagcaattctcctgcctcggcctcctgagtagctgggactacaggtgcatgccactatgcctggctaattttgtatttttagtggagaaggagtttcaccatgttggtcaggctagtctcgaactcctgacttcaggtgatccacccgtctcggcctcccaaagggatgggattacaggcatgagccactgtgcccaagccagactattactattttggttggcttgcttctgtgcgtagtacagggtcaggcacacagtaggtgcttagttttagtgctgaatgcatgaacaaataaatgaatggcttctgctctaatacatagcaatcaagttctttgaagtcatctttagacatttctttcttttttttttttttttttgagatggagttgcccaggctgcagtgcagtggtgtgatctcggctcaccacaaccaccgcctcccggatccaagtgattctcctgcctcagcctcctgagtagctgagattatgggcatgtgtcaccatgcccgactaattgttttgtatttttagtagagacggggtttctccatgttggtcaggctggtcttgaacttccaacctcaggtgacccacccgccttggccccccaaagtgctgggattacaggtgtgagccaccgcacccggcctagacatttcttataattagatcaaaacaagaaaaatcaacatataagaatctcagtgcatttaaatattagacccaccctcctgagtgactgttttctctttctcttccttccttccttccttctttccttctttctttctttcttctttctttctctttctttctttctttctttctttctttctttctttctttctctttcttccttccttccttccttccttccttccttccttccttctttcctccttccttccttccttccttcctttttgaaagagttttgctcttgttgcacaggctggagtccaatggtttgatctcagctcactgcaacctctgcctcctgggttcaagcgattctcctccctcagcctctggagcagctgtgattacaggcgcccgccaccatgcccggctaattttgtacttttggtaaagtaca[131 bp omitted]cttcttctgaaaaataatccctggtgttgctctttgcccgagtccttcagaaatgctgcaaacagtaaacaagcaactccactccaaggaggtgaatcatctgctgacgggattgcattccacatcaattctcgtgtcatatttgattaattttgtatctagcttcattacatctcatccctcatttcaaaggtgtccttcataggggacactggaggaagcagagaggggagaccgggcaatggacatcctgctgcgaagagttcatggatgccccaaacagtagcaactgagatttaaccctctcagagtcccacctctgcccatgagatgagctctctgctgttactgcagcgtttcccaagcttgagtcacggtgacccagccaccatgagacagccactttacacaccattaatcagcagaatggctggcaaatgctaacccacttagcagtgatatcctagcaggtgacagctaccggagctgacagcatctggctggagggcacacatctccaggcaggccgtctggagctctctgagttctatgtgggttactgtgaagctgaaggtgagacttccagcttcctggccaagagttgcttaaatgggtcagggcaggatttaactctggcacatctgagttctgggcccttattcaccagggctgatgacatctccttcccattcttccccttctacccacgtcctaccacatcttggaactctgaggattcatctaacatttattgaattcaattcaataatttgttgagtggtgtagcggaaacctctgctgtttacgttatgtctgtccttttggcccacttctaatttcaggtgaagctgtgtgcatgtgtgactgtagctgtggctatgcatggaggctgagcctggatcctgccctcagaccatgctgtagtcatggtcacagactgagccctcattttggtcacaggctgagctctgatcatggtcacggactgagccttcctcctggtcacagagagagccttgattctggtcatagactgagctctacagactaagctctgatcataagagaacacagtgagaaagagattgaggatggctcagttcaggccaccctcacttctgcagtcgcaggcgggagccgtgccctctcagtgggatatgaggagtgggggaatcagagtaaaggcatcctgcatctgaacaaagacagtgccaattatggcagcttgcattctcaggttcttaacttggaaaaagccgctgtggtttcaggcacagcctaatgaggttttcagagctgtgtcttatttcctttagtgcatagaggttattgtgttttgcaggaaaattaactagcaattaaatttctgaaaaagtgtttgaaactcctacaagcagtgcctcattgttttgcaagattgggtacacaatgtaataattccatctgcaaattaattttctctcactcacggcttctgatgtaactgcaatgtcatccatttagtcattcattcatcctttgattcagtgcacatttactacgtacctcatgttgaacctggcactgtggggagggcagaggtgggtctctgcttcccaggcagctccctgtctagaaggaagacaagattttctcagaaataatggtcagaggaggcagactatgatcattccattagaaggagatttatagtgatttggacttccagatttaggaggagggggaggtaactcctgact[142 bp omitted]aacctggtctctactaaaaacacaaaaattagctgggcatggtggcacgcgcctgtagtcccagctacttgggaggctgaggcaggagaattgtttgaacctgggaggcagagactgcagtgagctgagatcgcaccactgcactccagcctgatgacagagagagacagaggaaaaaaaaaaagaaagctgaaagttgtagtaactaacattgattaggcacctgcaatatgtcagactctgtggcaggtgttttgcatctgggatctcattcaatccttaggccagtcctatgagatggtgttatcacccccatttacagatcaggaaactgaggctcagacaggttggatgacttgcttaagatcacatacccagcaagtgttggagtctgttttggaacttgcaactgtctgattaaaacatttcccactaaacatgctaaattctttaaggatgacttctttgccaagtggtttgtagccttcctgcttcccatcagcacaaatgaaggagttggagaaggtctagaggggagctctgccaaggccagaatgacatcaaatgtgctctgaagaagtaagcggctgggactgcaggagagatggctacgtggtcacttactgaatatctactgtgtgtctacgtagtgctttccatacgttttctcatttcatcctcacatacactcttcagggtaggcattattagctgcatcatttttgttgttgttaaggaaatgaagacttagagaagctaaatgatctgttcacagtcacacaactggtaaatgatggagctgtgattcatgctcaggtctgtctgactctgaagtctgactccttttcttttctttacctattctttttcttttcttttccttttcttcttttctttcgttttctcttttttttttttttttgagatggagttttgctcttgttgcccaggctggagtgcaatggtgtggtcttggctcactgcaacctctgcctccctggttcaagcaattctcctgcctcagcctcccaagtagctggggttacaggcatatgccaccatgcctggctaatttttgtatttttagtagagatggggtttcaccatgttggccaggctggtctcgaactcctgacctcaggtgatccacctgccttgtcttcccaaagtgctgggattacaggtgtgagccactgcgcttgggtctgacacttttcttttttttttttttttaatttttattttttttattgatcattcttgggtgtttctcgcagagggggatttggcagggtcacgggacaatagtggagggaaggtcggcagataaacaagtgaacaaaggtctctggttttcctaggcagaggaccctgcggccttccgcagtgtttgtgtccctgggtacttgagattagggagtggcgatgactcttaacgagcatgctgccttcaagcatctgtttaacaaagcacatcttgcaccgcccttaatccatttaaccctgagtggacacagcacatgtttgagagagcacagggttgggggtaaggtcatagatcaacaggatcccaaggcagaagaatttttcttactacagaacaaaatgaaaagtctcccatgtctacttctttctacacagacacagcaaccatccgatttctcaatcttttccccacctttcccccctttctattccacaaaaccgccattgtcatcccggcccattctcaatgagctgttgggcacacctcccagacggggtggtggccgggcggagacgctcctcacttctcagacggggtcgcggccgggcaaaggggctcctcacgtcccagacgatgggcggccaggcggagacgctcctcacctcccagacggggtggcggccgggcagaggctgcaatctcggcactttgggaggccaaggcaggctgctgggaggtggaggttgtagcgagccgagatcacgccactgcactccagcctgggcgccattgagcactgagtgaaccagactccgtctgcaatcccggcacctcgggaggccgaggctggcggatcactcgcggttaggaactggagaccggcccggccaacacagcgaaaccccgtctccaccaaaaaaatacgaaaaccagtcaggtgtggcggcgcacgcctgcaatcgcaggcactcggcagggtgaggcaggagaatcaggcagggaggttgcagtgagccgagatggcagcagcacagtccagcttcggctcggcatgagagggagaccgtggaaagagagggagagggagagggagagggagagggagagggagaggggagaggggagaagggagaggggagaggggagaggggagaggggagaggggagaggggagaggggagagggagagcggccctgacacttttcatcttacttagctgcttcttctgtggtgtggtgtattcccaggcttggggcatggtggaccgttacacggtgcacattgtaggttgttcctaggagtttctgagattaggcatcaggaagaagggatgacttgtcctgaggctcaagccctaattctagctcctgtccccagctggatcctttgccagagccaatcatctcatccaccacttcttaagaggcctcatctatcctatggcaattactaacacctggttgtagatgacatgctaatcctacccgggcccttcccctgagctgcagacctttacctgttcaccttccggacagctctttccagatgaccctgggaatgtgaacccagcacagccagatgaaatcatcaccttctcctgcctgcccttcctaatggtccccatttgagtgaatggcaccctctgaaagcctttcttttcaaatcctttcctctctcaagcatataaataacaacttggtgactgcatcctgtctttccttctgatggttcccttgctccacccccacaccactgccttggttcaggcctcgtgcctcctcccagatggttacctgcctttagtgttgctctgcccagctccatactatagctggagtggtggttgcagaggacacaggctctgaacctgtgatgtgctgtcacccatggcaagtcccttaacctttctgtgtctcctcctccctgtaagtgaaatgaagataacagaaccttcctggtagggtttgtgtgaattatatgatgtgatatagcatgtggataaagcatgtggaaatggatttggttcataatagacactcaataactattagccaatgcaagcagaccagaacagatgatgcctattctgctcaaagtcttctggtggctccccattgcctctggaattgaatccaggctccttataggcctttgaatttggctccgaccatctctctagcatcatatcctgatatcctggagcttatcccttaccccatctctacctcttgtcttaccccaatattttttctactttatttttgtgtgtatttatggtgtatgacatgatgttttgaaatatctataaattgcggcatttccctacttttatttccatccatatggatagaaacttgggtttccaggatgcagcacaaggagcggggatccaatgtcttagttcaatctgctataacagaatactatagactgggtggcttgaacaataggaatttatttcttataggtttgaagtctgtaaggctgagaccagggtgccagcatggttgggttctgatgagggccctcttcctggtttacatgtggctgagttctcatggtgtcctcacatggtagatagagagcacagagaggaagcaagccctcttacatctctccttatgtgggcactaatcccatcatgggggctctaccctcaacacctaaacacttcccaaaggacccatccccaaatatcatcacattggtttcaacatatgaattttggggaatacaaacattccgttcatagcaccaaggctaagcccaggagagttcttgaactgaggagatggactgagtctgggagagcagggcagatagaatactggagaggagacagctgcacagagagaactctggagagcttcagagggccccactcaagaactcagtgcagaactcatcagggcctgcatgtgagaaaattacttggggccagggaaagtccattcaaaaaggttagaggtaacagtgcctagtgttcacacagggctgagaacacactctagctgtttctaccagaaagatttgaaacctcatggttcttaaggcatggagtatggaactaagataggtcttgcctcactagtggaaataatgagcacagaacctgcctaacaaattttaaaagcaaaagcagaaaggattttaaaagcaaaagcagaaaggatctctgtttccaagtaacttaactgcattacagaaacatagtttaagaatatgtataggaatacaaaaatatccagcaccccaaaaggtagatctataaaatctggcatccaataagaagttatcaggcatgccaagaatcagaaatatgttatccacaatgaggagaaaaattaatcatttgacatcaatccagaacagcaacaaatattagaatgggcagattaagacatttaacttgttattttaactgtattccatatgataataagtagagatatgggagatacttaaaaaggccaaagtcaaacttttagagattaaaactataatggttgaagtgaaaaatacattggatgggattaatggcagattaaacattgtagaatacaaaattattgaacttgaagacatagtaatagaaactataaaaatgaacacacagaagaaaaaatagaaagaaatgaatatagcattagtgaactatgggacaatttcaggtggctttatatacatgtaattggagtcaccagaagaaaagacaggcagagtagtgggtggggcagaaaaatattttaaggaataatggtcacaaaatgtccaaatttgattaagactataaactcacatccaagaacctcaataaatcccaagaacaagaaacataaagaacaccacaccaaggtacatgacaatcgaattgctaaaaatcaatgataaagagagaatcttaaaagcaactacagagaaagatgttactatacagagaacaaagttaaggatggcagtagacttgccagaaacagtgcaaacaaggggacaatagagaaacatcattaaaatactgaaagatgaatactgtctactagaattctatacttaacagacatgtctttcaaaatcaaaggttaaaaaaattcattgccaacagacccatatgctaagaaatgttagaagaagtcttctggacagaaggaaaatgatatcaagtgaaaatcagtatctacacgaaagaataaagagcactagaaatagtaactacatatgtaaatatatgacattttcttatcacttaaaccttaaagataatgtttgtgtaattaaaaataataacaatgtactgcagggtttgtaacatatacaaaaggaaaatgtataataacatgaacacaaaagttgggtggggataaatggaactacgctatcgtaagtttcccataccatacttaaaatggcatcatatcacttgtaagtggactataacaggttaaatatatatatacatatataaaaaataaactaatgaaatgattaacaaaacaaaaagtgatggtttataaaccaacaaaggagataaaatcataaaacatacttgcttaaaccaaatgaaggcagaaaaagagcaaaaaataaaaaaatgggacaaatggaaaacaaatagtaagatgacagatttaaacttggccatagtaataatcacattaaatgtaaatggtctaaacaccccaatttaaaacatttcagactgaataaaaaacatggcctaattacacactgtccacaaaaaacacaccttaaaaataaaatacacaagtagattaaaaataaaaggatggaaaaagatatagcatgctaacattaattaaatgaaaacttatgtgtctatattaaatttcagagccaaaaaaattatgaggggtaaagaagatgattttgtaatgggaaaaggatcaattcatcaagagaacataataatcctaaaattttatgaatctaataagagtcttaaaatacttgaagcaaaaactgaggtaatttcatggaaaaaatagacaaatccacaatcttagatgtttcaattctcacttctcaataactgatagaaaaattaagaaaatcaataaagatacagaagttttgaacaccatgagccaatttcactaaattcacatttagtgaattacttttgtgagtgcaaaagtaattgtggtttttgcattgttggaatttgctctttgatattggaatacattcttaaataaatgtgttatgttatacatcactttaatgggcatttctcatttttttttctaatgacttattacttgctgtttattctgtttattttatgtttattttagactatggaaatgatgttagacaaaaagcaaattcaagcgattttcttatttgacttcaaaatgggtcgtaaagcaggggagacaactcgcaacatcaataatacatttggcccaggaactgctaacaaacgggcagtgcagtggtggatcaagaagttttgcaaaggagacaagagccttgaagatgaggagtgtagtggcttgccatcggaagttgacaatgaccaattgagagcaatcatcaaagctgatcctcttacaactacacaagaagttgccaaagaactcaatgtcgaccgttctatggtcgtttggcatttgaagcaaattggaaaggtgaaaaagctcgataagctcatgaactgagcaaaaataaaaaaaaaatcattttcaactatcatcttctcttattctatgcaataacaatgaaccatttctcgatcggattgtgatgtgtgattaaaagtggattttacatgacaaccggcaataaccagctcagtggttggactgagaagaagctccaaagcacttccaaaagccaaacttgcaccaaaaaagtcatggtcactgtttggtggtctgctgccagtctgatccacaacagctttccgaatcccagcaaaaccattacatctgagaagaatgctcagcgaatcggtgagatgcactaaaaacggcaatacctacagccaacatttgtcagcagaaagggcccaactcttctccatgacaacatccgaccacttgttacacaaacaacacttcaaaagttgaataaattgggctacagagttttgcctcacctgccatattcacctgacctcttgccaattgattaccactttttcaagcatctcgacaattttttgcagggaaaaggcttccacaaccagcaggatgcagaaaatgctttccgtgagttcgtttcaatcctgaagcaaggattttttacgctacaggaataaacaaacttatttctcattgacaaaaatgtgttgcttgtaatggttcctattttgactaacaaagatatgtttcatgtggctttcataccagggatgcagggatggtttaacatctgtgatggttaatattgagtgtcaacttgattggattgaaggatgcaaagtattgttcctgggtgcgccctgagggtgttgccaaaggagattaacatctgagtcagtggactgggagaggcagacttaccctcaatttgggtgagcatcatctaatcagatgccagtgcagctaggataaaaacaggcagaggaatatggaaggactagactggctgagtcttctggcctacatctttctcccacgctggatgcttcctgcccactaatatcagactccaagttcttcagctttgggactcttggaccttcaatcacagactgaaggctacactgttagtttccctacttttgaggttttgggactcgaactagcttccttgctcctcaccttgcagacggcctattgtgggaccttaccttgtgattgtgtgagccaatcaatactccttaataaactcccctttatatatacatctatcctacttttctgctcctctagagaaccccgactgatacaacacccacaagtcaataaatgtgatacaccacataaacagaattaaaaacaaaaaaatcacatgatcatctcaatagatgcagaaaaaatatttgacaaaatctagcaccactttatgattgaaacccttggcaaattcagcatagaagagacataccttaaggtaataagagccatctatgacaaactcacggctaaatgaggaacattatactaaatgaggaaaagttgaaagcactcccccgagaactggaagaagacaaggatgttcactttttccacttccattcaacatagtaatggaagtcctagccacagcaatcagagaggagagaaaaataaaagacatccaaattgataaagaggaagtcaaactgttgctgtttgctgatgatatgatcgtatacctggaaaaactctaaagactcatcaaaaagctcctagaactagtaaatgaattcagcaaagtttcaggttacaaaattaatgtacacaaatcaggaactctgctatattccaactgtgaccaagccgagaatcaaatcaagaactcaacccctttcacaatagttacaaaaaataatacttaggaatatacttaaccaaggacatgaaagacttctacaagacaaaccacaaaacattgctgaaagaaatcatagatgacacaaacaaatggaaacacatctcatgctcatggatgggtagaatcaatattgtgaaaatgaccgtactgccaaaagcaatctacaaattccatgcagttcccatcaaaataccatcatcattcttcacagaattagaaaaaaacaatcctaatattcatatggaaccaaaaaagagcccacataaccaaagcaagactaagcaaaaagaacaaatctggaggcgtcacattacccgacttcaaactatactataaggccatagtcaccaaaacagcatggtactattataaaaataggcacatagactaatggaacagaatacagaacccagaaaaaaagccaaatgatctttgacaaagcaaacaaaaacataaagtggggaaaggacaccttatgcaacaaatggtgctgggataattggcaagccacatgtagaagaatgaaattggatcctcatctctcatcttatacaaaaatcaactcgagatggattaagggcttaaatctaagacctgaaaccataaagattttagaagatagtatcaggaaaactcttctagacattggcttaggcaaagacttcatgaccaataacccaaaagcaaatgtgacaaaaacaaagataaatagatggggcttaattaaattaaaaagcttcttcacagcaaaaggaataatcagcagagtcaacagacaacccacagagtgggagaaaatctccacaatctatacatcaggcaaaggactaatattcagaatctacaatgaactcaaacaaatcagcaagaaaaaaaaaacaaacaattgcatcaaaaagtgggctaaggacatgaatagacaattctcaaaagaagataaacaaatggccccaacaagcatatggaaaaatgctcagcatcactaattataatggaagtgcaagtcaaaaccacaatgtgatatcaccttacccctgcaagaatggccataataaaaaaaatcaaagtaatggatgttggcatggatgcagtgaaaagggaacacttttacactgttggtgggaatgtaaactagtacagccactatgaaaaactgtttggagattccttaaagaactaaaagtagatccaccatttgatccagccatcccactactgggtatctacccagagggaaagaagtcattataccaaaaagaaacttgtacacacatgtttatagcagcaaaattcgcaattgcaaaaatgtggaaccaactcaaatgcccatcagtcaacaagtggataaagaaactgtggtatatacatacaatggaatactacttagccataaaaaggaatgaattaatggcattcacagcaacctgggtggaattggagactattattttaagtgaagtaactcaggaatggaaaaccaaacattgtatgttctcacttatatgtgggagctaagctatgaggacacaaaggcgtaagaatgatacattggactttggggactcaggggaaagggtcgggggtggtgagggataaaagactgcacattgggtacagtgtacactgcttgggtgatggatgcaccaaaatctcagaaatcaccactaaagagcttattaatgtaaccaaacaccaccggttccccccctccaaaacctattgaattaaaaaattaaaagtaaaaaaaacgtgtttgaacctagttataatgatttaaaattcatgggccaaaactgcaattacttttgcaccaacctagtgcaactccacccagtgagagcagaatatacattctcttcaaacacaccatgaggtcttcctgcaaccttccctgatccaacatggcttcgtggctgtgcagcatctctgcagtgtcacagtggctactggaaggcccaggcctgtgctggggatgttgcagctgcggctgtgctgcatttctatcccaaggacaacgaaggctactggttctgctccctctttgttcacaaagtggatccctggaaggatgcccactctgccctgctgtccaagaaggagaccagcaacctctacaagatccagtttcacagtgagaagcctgagtgcccggatgcctatagtaggcactgatggaggcagcactgtccatactgcactaggatgaggactaccctgctccctcatgggcaagtggaacacgtgctgtagggagcaggaccaggcactgcacctgtggaggttctcaggtggctactcagccctcgcggactgcatgacaaggagtacctggaggtccggaaggagtgcagctggatgctgttgtccaggagacaccaattgctccttgagttcagcttctggaatgagccatagcccagcgtggaccccaacatcttatgagctgaggacatgcaagctgaagccaggaaccatgatggagtaggggaacaattggggtcctgccagcaggtaccagcagcaagtcccagcaggagaaccaggaggtgatcgtggctcctcccaaataggagagctccaccttgtgcatcatctctggtcctataaagacccacagtcttgggaggagacccgaagtgctgcctgcaggaagagggcttgggatgaaatgtctattgtacagttcccctcgggcaacacgtggagtcttggatcctcttgaggatcctcttgaggtcctcttgaagacctcacctctccagtcatgctcccaacacttctaccttcttccctttctccctcagggcaaccctggacagaggagcaccccagtcctactgtcatggttttctcttggctctgggaggactctgagggtccatgcttagctcagacaacggggaactgaaggatgacaaattctgaggacttagagctcagctcagctccttcctgccttcccctcctccctccttccccctgctggaagtagttcctaatttctctgaatgaaacatagcaatcttctaggtctgctgacatcttttcctaagatttctcagtccccagctatcaccacagaaatcctcggtttagcttaattgcacaaaaggaagtatgtccagtggttagaggtgggatgggagggaaggaggtcaggtcaggccaagccaggtcctcaggaattccctgatctccactgagccactgccacccacttgctgtttagtctaaaccaagtccctcctgatggggaaaatcctggaactgctaaaaaaaacccctcaaatcggcaaggtcaggaggatgtccagacattccatccaaaaagacagggaaaaaggatgggacccaggaaggatttaggggcaggagacagacatgtaacagaatccagaaggtacaacttagaattcagaacttgagtttgaactgcagaatttggaatttggaatacagaattggaagatagaacagaggtgacaggctgggcgcggtggctcatgcctgtaatctcagcactttgggaggctgaggtgggcagatcatgaggtcagaagttcaagacaagcctggccaacatagtgaaacactggctttactaaaaatacaaaaattagcctggcatggtggcatgtgcctgtaatcccagctactcaggaggctgagccaggagaattgcttgaacccgggaggcggaggctgtggtgagccgagatcttgcagtgagccgagatcatggcactggactccagcttgggtgacagagcgagacttggtctcaaaaaaaaaaaaaaaaaaaaaaaaagaaacagttggaatagaagaagtctggggcatatcatttagatgctaaaaaaaaaaaaaaaacaacatttccaggacattttaaaggtatttggaatcagggctgttgctcccggtggagtaggttcccagggagactgggacacagaaaagaagggacttggagtcccgtctgctgggcactcagctcaaagctcacacccctgacggactctgcttgacgtttacatgttacccttctcaaacggggcttctgtgcctcctggaaatttaggtaagcttggttcaaccctcccaagttacagcctgcgaaagctgagggtcttcctcatgatcctggacaattcctgatggcctaattcttcagtctgttcttttcggcattagagggtgcagcctcctgccatcttggataaaaaacccagtctgcagtggtttcactaagggtgctcccaacagatgattcatgggtgtgggggacttgctcaagatttgaggggtctcgccaggctccccagaatcttcatccatttcactgttcctcttccccttcctctctcttttcctctctttttcagggtcaccagccctcttcccaccatctaaagctcatatgagcttactgtgtggacccactcagaagcccagagttggaataaagattattttaaactgaagacatttgaggttcaacagacgcagagaaaagcctcctcagagcttcccttatctgactaaaagcagcaacttctggtaaatgaagctaccatagatcccttctccgggggagtttcatggccctgaggaagatggaaagaccacctttatttgtatggaaagacatcaccacactcttcaaaaaatgtcctgttatcctgaaaaaaatgtatttcctaaagaagcccatctgtatttcccataggagccttttctccctcctccctttcccctactaggttaggtatttaagccccaaattctaatcacgactttgagttactcatcactgaacactcaggcttgcgtaagtaaactcttctcttctcttgcgaatgtgtcttttgtcagtttaatttacagagctccaatcaccaaacctaaaaagatagagaaaaagtttacctctcctatattatttatcttctgcctcctcctctaaagtctcagcttctaacccaggtaagattatctaggaatcgtccccagaaaggcgtgtttcctaagcctaccggtaattatgagagaagaaaaattttccttctagctgcacaggtattacatggatggggtcaggataaacccacattactcaaagaaatatttgcatttttaggccaaccactatccacagaatctctgggcttaactattccttagggagagcacaagaaggaaattgcaaagcttttgtcaaaatatttggccaccaaaaaattcctgcttgcttcacagagacagatgcgtgaatgccacagcactatctgttctgtgttttatgatcctccccaaaataacagtctctgttggatttgcgctggtgatttgagaataagaaactttaaaaacaactagacaaccagttcaagagagcagataatgtatattcagcagcctccccctcctgccctaacttctgagagtgacagaaataattattgtaacaagttctcattaccatgctgggaaggaaggagagaggcagttgatggacagtaattataagaagctccttagatgaagcaaggaaactgcagtcaaaaatcatctgtaggagaggaaggatgcaaaagatgggcaagggggcaagggcatggcaggcctggagattgtgatgccaggatgagatgggaccctgatgctcctgatcgagccacagatgggagatgccgcccctttatcaggtagcaaacaacgaaatgtcttgttttaagaagtagcaagttcgggc[137 bp omitted]ggtggcaggtgcctgcagtcccagctactcaggaggctgaggcaggtgaatcacttgaacctgggaggtggaggttgc[134 bp omitted]ctggggtggctgacaactcccagcaaaaccagacagcccatgtgcccagaaggttagttaatgcccctctctcctacatgtctcacatctctgccataatcaagagagaggctgaggtatctgcctgggtagcacattcaaccccttcctatattcaggctagtgtacatcagtgtaacttctccagcctggcgcacagagacttttacaaacaaagatgagcttacaaacaacgatgagcatacacccagaagccaacaacacttgagggaagccagcaccgtgaaagggacatcaaagtcaacacatgaacttatatctgagaacaaaattaaaaacgcaagtggagcagggccttgagtacatgtagttattatccctagaaagagatgagaagggaatagtatgtagctataaaaagaatgagttcatgttctttgcagggacatggataaagctggaacccatcattctcagcaaactaacagaggaacagaaaaccaaacactgcgtgttctcactcataagtgggagttgaacaacgagaacacattggacacagggagggaaatatcacacaccagggcctgttggtgggtggggggcaaggggagggagagcattaggtcaaatacctaatgcatgcagggcttaaaacctaggtgacgggttgttaggtgcggcaaaccaccatagcacagtatagctatgtaacaaacctgcatgttctgcccaagtatcccagaacttaaagtgaaaggaaaaaaaaaaaaaagaaggagatgagaagagattgccctaagaatcagtctgctacccccacgttcatatcagcattatcctcaatagcaaaaaggcagaagcagcccaagtgtccattgatggatgagtggataaaccaaaatgccatcttcatccaggagaatgttaccagagaatgttcagccttaaaaaggaagaaaatcctatcacatggaggaacctgaagaagacattatgctatgtgaaatacgtcagtcacaaaaggacacatactctatgattctgttcatgtaagtgacctagagtggtcaaattgatagaaagttgaaaggtgatttctagagcccagggggaggggaaaatggagagttggtgtttaatgaaaacagtttcagtttgaaaggatgaaaaagttctggagatggatggtgatgatggttgcaaccatgtgaacatactcaatgctactgaactgtacttttaaaataattaaggtggtgattttgtgttatgtgtgttttatcataattaaaaaaatcaacttgatatcttggaaataaaaaatcacgattgaaactgacaaaatagaaagttgagcagattggcctcagctgaagtgtaaattagtaacttagaagactgaactgagaactttagaatgcaacactgaaccaaccaagagaaacataggaaaaaagactgatgcacgtagcataaatttagaatttctaacattcctataataaaaacgtcagaaggattctaaaggattattagtattacttaggaataataggatgcaaaaaatggtggcttaacaagatagagattacttatcgaccaaagaaaagtacagaggaaaggagagctggtgtatggctctacaagtatcattgaggaccctgattcctgtcttcctgctttgccagcccagcacatgggctcttgaagctcacctaatggctgcaggcagggaaaaagagaaaagccagacctgcccagttaactcaactccctttaagcaggcttcccagaattctgcaaaacacttttgcttagatctcattgtctagaatttaaacacgtggccacagttagcttcgaagtagacattcttcatggcaatgtgtcctgctaaaatcagtattctgtttctaagaagaaaggagagaatagctattggggaagccagtggtagtagctatccactccccgcaccccaaatacagagaatgaagagtggggacaaatgcaaaataaggatagaagtaaaaaaatcccagaataggagaaaaatatgagttctcagactgaaaagctccactgagtaccaaaatgggatgaatgcaagaccattggacacattgtagtgaaatttcacaataccaaggatcaagaaaaatcctaaagacttccaaagagtaaaaaacaa[213 bp omitted]gaggcaggaaaattgcttgaatccaggaggtggaggttgcagtgagccgagattgtgccactgcactctagcctgggcgacagagtgagactccgtctcaaaaaaaaaaaaaaaagagaaaagagaatcagactgagaagatgtctatctttttattatcaacaagggttgcaaggcagagaagcagtttcttcaaagctaagaatgaataaatcatttgaacttagattctgtatttaagaacctagtatccttctattcaagagtaaaggtgaaaaaatatttaaaaatatacaaggaactgtatcactgaaagatttaccggagtatgtcatccaggttttaggattgtcaaaactgagggtgacttccttctctgggataagcttgttttaattcttaaacaacaaaaatagatgaaagctttggaaaaccaagagatagaaatcaatcatttgagttgttgattttctttttattgaagtttctttttctttttcttttatttaggtttcttttttttttcttcttaatgagagttcattacatattcttgataaacatccttcactggacacatgatttacatatattttctttcagtctgtggcttgtctttacatgctttttcagtgtctttcaaagagtagacatttttag[144 bp omitted]gcctccggggtagctgggactacaggctcccaccaccacgcccggagaattttttttttttttttttgtatttttagtggagacggggtttcaccgtgttagccaggatggtctccatctcctgacctcgtgatccacccgcctcagcctcccaaagtcctgggattacaggcgtgagccaccgcacccagccattagatccaatttaacaattttttcttgtataggttgtacttttgggttgtagctaagaaatcttcgcctaactcaacgattttctcctatttcctctgtaagtttcacagtttcaggtttcatatttatgtctatgctccattttgagtaaatttgcatacatggtgcaaggtatgaattgaagtttgctatttttgcatatggatatccaattgctccagcaccatttgcaggaaaaatgatcctttctctaatattaagtaataatcagctatcgccacattgtttatcaccttcgatggtgagatttcttttgtccccaaacaaatatccgagagggtcccaagatgaagacagctcatagccaagtttgctgggcaagactcagtgtgggttcataatggggagtagatctcatcctccttttatgctccctgggggacacacgatggaagtgatgatcttatcacagttgttccttttctcacctgagcatggaggggccagttctgtgtattcactaacagagtcactgaacagccaacaagcatactctctgggcccaggcacagattccttataagaattttatagatattatgtttccttctcttcttgcttttattttcctcttcttttttgctttttggcttcttgcttttttttcttgatggaattttcagaaccttgcaatgctttaagtaacaataggtataatttattaattatgtcttttcccagggaaattgtcacaatgctcacaagtcctctgggtttttaaaaatcaggattcctcaatcatctcccagaacttgcagaaagaatccaagcgaaagtcattgaactgtgagaaggaacgatgagcacagacaacacccagttaaatacattgcttaatcgaaggaggtggggctgggcgcggtggctcacacctgtaatcccagcattttgggaggctg[134 bp omitted]gaggcaggagaattgcttgagcctggaacatggaggttgcagtgagccaagatcatgccactgcactccagcctggctgacagagcgagagtctgtctcagaaaaaaaaaaaaaattctaaggaggtggtggtgatgaatgtgacacaagaaggcagagggaaataaatgggagttggttttggtcttgtttgggcaaagattatagatactgacttgagattggatactgttagcaaaacataacattggcctgggcaaacatagtgagacccttatctccacaaaaaattaaaaaagtaattggcatggtggcacactcctgtagtctcagctattctggaggctgaggtaggaggattgcttgagcccaggagtttgaggctccagtgagctgtaaaaagaagaagaaattaaaaaaaaaaaaaaaaaacaagtctaagtagaagtgttaaaaagctaagactaaacattgggcgaatgaatacaatatgtaaatttcaaacttagaagaaaaatgaaagcaagtttgagcaaatcaaacaaagccagaaagggaaaaacaagaacagtgagaaagtatgaaaaacacaaaatcacttggctggtgtaagtccaagtaacaataataatgtgttaaatttacttattaaaagacagagactctaagctgagtaaaaaacccaatatctggatatatgtgatttgtacaagaaactcttaaaacaaaatgacagaggaatgttgaaaataaaggggtgagtctgagcacggtggctcatgcctgtaatctcagcactttgggaggctgaggcaagtggatcacgaggtcgggagttcgagaccagcctggccaacatggtgaaaccctgtctctactaaaagtacaaaaaattagccatgtatggtggtgtgcgcctataataccagctactcgggaggctgaggcatgagaatctcttgaacccaggaggctgaggttgcagtgagcagagaccacacgattgcactccagcctgggcaacaaagaaaaaagttttcttttttttgtcttaaaaaaaaaaaaagaaaacaaaggggtgaaaaatataaacaaatattaacaaacaaatctagaatagcaatattaacaccaagcagaatggaatttagggtgaaaagcattataaagggcaaactgaaacactgtttataggtaaaaagaaataatccatcaagtaatgatcacagttgtgaaccattgtatgccaacagcatagatatggaaatattaaagcaaaaccagatagaaatacaaggagaaatgcccaaagctgcaaccacacataaagttaaaacagaaatgaaaggaaaaatagacaaagccttattcttcactcataaattggctcattaaatagatgaaaataattaagaaaaaagataatttgaataaaaatgtttgattttgtagttttgtgcctaagagagaatatagctttcaactacattacttgtaattatgttttagattaaaaatcagctcaagttgggccacaaaggaaatgacagtacgttctaaaaggcagaaacaagccactttcatatggtgaattcaaacaggctattttcatatgcaaaatgcaatagaattagatattcataacaaaaacataactgaaaaaccttattacttgaaaggtttagaaaatcccatgtgtgtttctaaccactcttgggttacagaagaaatcaaaatgtattaaaattaaaatctctttatatattgatttaaaaaaacattagggagcaaactctgtgttatagataaaatggtattcggaggaaaatctataaccataaatgcttttataaaaataaaagagagcttaaaatcaagtgtctttcagccaagaagtcagacacaagcacaaaagaaaactccattccctatttaaaaagtctcttcgaactagatagagtagaaaatgtgctgcatttggtaatgggtatttacatgagacctaggaaacgtcacactgaatgtttttgaggtgcttagcacatatggaacatgatgcagatactgcctattgcctctcctactcaatgctggggttgagctcctggtccaggggtcctcaaagcagcttgtctattgggatcatgtgggagtcctaaaataataccaatatgcctgcatcccatctcagtgcacctgagtcagaattcctgggggtggggctcaggcactggtatgttacaaagctctctgggtgataggtttaaaaacaatcctctagcctatgaaatgagacaaagaaaataagtgaaagtcatagataccagaaagagaaaaaactatatggttatgtacctagaatatggcagagaatcaactggaaaattggaaaaatcaatgagagttcagaagatgatagaatacaaactcaatataaaaaatcaatagatttcctataggttatcagtaataaattagaaaaggtaataaaaattccaaattataatggaaatcgcaaccacaaaatataaaatagaaaaaaactaaaagaaacacaaaagatctttatcaaggtaattatgtttaacaaaagatgtcaaaaacaacctaaataaatggagagattataccatctacatagataggaacactcaactgtaaataagccaatttactctaaattatctataaccccaataaaaatgtcaccaaaattcctcatggaacttcataggcaaattccagaatttatacgaaggaacagatgtgtaagaacaaacaagataaatttgaaaaaggacatcagtgatgtctagtatcttctcctttagaccagcgatccccaacctttttggcaccagggaccggtttcgtggaagacaatttttccacggacgggggtgggggagatggttttcggatgaaagcgttccacctccgatcatcaggcattagcgagattctcataaggagctcacaacttagatccttcccatacacagttcacaatagggtttgggcgcctgtcagaatgtaatgcccagctgatctgacaggaggtggagctcaggtggcaacgtgcactagtctgctgctcacctccagctgtgtggactggtttctaacaggccatggacaggtactggtttgcagcctgggggtcagggacccctgctttaaacaccaaaatatatggcattaataatcaaacagtgtggtattggtgcaggaaaaaaaaatagataaatgaaccagaacagggaaaccagcaaaagatcatacatgggaattcaatatatgataaaggaggcatttgaaattagcaggggtaggatggatatgtcaatttagactagtggtagctgaacatgacagaaaactcagaccaatggcttaaataagaggaagccttattattgatccttcgcatagaggagagctggaggctaccagcccttaacaagtatggcagctccatgaccactaggaacccaagttccatctattgtctgccccatcatccttagtgcagtgatttcattttcaaggttgcttatgattgaagatgcttttggagctctggccatcacatctacattccattcaggaagaagaaataaagcagagaaaagcaaaagcgcatgattctttgccttctcagcctttctgggagttctacttaatgacttgtgcttgtgtgatattggctacccctatctgcattggaagcaaaaaaaattttttttagctgggtacattgctaccccaaatactaaagatattctaccaggaaagaaaaaaggcaaatggattttgggcaggcaactagcagactgtccagtctgtgtgatgtgcagcaggttcttcctcaggtcgcctgctgctcctcatgaacgagtgacctgtcaatttcaactcaattgctcttccccacgaatacccagtgaactgtggtagagaaaaaaaaacatagatatacccaaaatattgtaccacaaaaggggagaaagggaatcacatagaagttactattatatagtaattatgacgtctctgggcagaaatggtaaagattccctattttgagagtgaggtaaattttttggttacccagcctggcagtgcctggctctatactttaggaaagggttgccagattaggcaaataaaaatacggtcacctagttaaatgtgaatttcagataagtaacaaataactgctttagtatagggtgttccaaatattgtattatacactaaaaaatgtgtatatacatacatacatacatacatacatacatacatacatacatacatacaattctggaagcatagttaccaaactaaggtcagtgatatatttggggaaagaacttgaaataaaaagtgatggtcaagggaagtttgctttactttatctgtgatgctcaaaatttgtatttgtacactgacaattattcttgtttacttgtattaggaagacataaaaagaatgtaagaggttaaccaaggtcttggtgctgaggctacagaccaatgaatgacattatggtcacatggcctctggagtcagggtcagtagacctggtcttctggccaccactgagcagccgcacctgctctctgagactctcctttcacattgacaaaaaaagaggtgggtgatgatacccactgaagagttgttgagaagatccacaatgtaaacgtaagacaatttatggacaaatgctttgtaaatcctgttggagcatacaaattatgatatataatttatgatgtctattcctattatgttgtataatttattatatagtcatattggaatgtgccactacataattatatagtaatgtgtagcattttggaatattgagtatcaaatgtaggcatgaaagcagaagtgccccatctagggtagaagataaagaaacattaaccaacttaattcatgtgagagtgccaagtaagtgcttggtaattaaaagtctactctcaaagtgacaaacttgaatttcttttttttttcctaaaagaaaaaaaagggatacaggtgcagaacgtgcaggtttgttacataggtatacgtgtgccctggtacacctattgatccgtcctctaagttccctcccctcactccccaccccccaacaggctgtggtgtgtgatgttcccctccctgtgtccatgtgttctcaatgttcaactcccacttatgagtgagaacatatggtgtttggtttcctgttcctgtgttagtttgctgaggataatggcttccagcttcatccatgtccctgtaaaggatgtgatctcattgttttttatggctgcatagtattccgtggtgtatatgtaccatattttctttatccagtgtatcattgatgggcttttgggttggttccatgtctttgctattgtaaatagtgctgcaatacacatatgtgtgtatgtgtctttatagtagaatgatttatattcctctgggtatatatccaataatgggattgctgggtcaaatggtatttctgattctagatccttgaggaatcgccatactgccttccacaatagttgaactaatttacattcccaccaacagtgtaaaagcattcctatttctccatagcctctccagcatctattgtttcctgactttaataatcgccattctgactggtgtgagatggtatctcattatggttttgatttgcatttttctgatgatcagtgatgttgagcttttttccatgcgtttgttggctgcgtaaatgtcttcttttgagaagtgtctgttcatatcctttgccctcaaagtaacaaagttgagtttcaaacacaggtccccaaattctaagtcctggactctttccatgggccctcttaaaagttttacatagtcccattgctttttcattctaattattattcatgcatgtgcactgagttatttctttagcttctatttttctttatcactgatgccattatttaagcactggaatttcccagattgccagtacatggtcatttatttagtgtgacacaaagctattgattagtgagattggacctaggaccaacccaggtctctgtagtaagaagggtagagtagttattttatggagttgtcccagcatatgggaaaaatgtaaacttttacgttaaaaagtttaatacattctttgcattaatattattactatgaagttgatatttaagaaattatctggaaataatatggattctatgagcttttagggtctatcatgaaagaaaggtagggatcaaagtctgtggttggtgggtaggctggaaactggtgcacgtggtgagtataagagcagggagcctggcagagcttaaaatagacttactagccaaatgtcagcatgcatgagctaaggcctgtgcacagagaattaaaccatgtgtctggtaacaaggaacttctgtgctgaaaatttattaatcaatatttactcaactttaaaaattgctattgtctcactcttagtattcacaccagagcaatacagtaaattaaatgcatcttcaattattcaaagctgcttctgaagaattactacacctaaatattgtgttttaatgaaccgtacttaatttttgcacggtcaagtgactgtctgtgttacatcttcctcccaggggtctgagacagtctgtctggtgctgcaggagacacatggtttcaaatgtcatcctgaaaccccccatacgcccatccttctgctttcctgctaagccaggctgagtaatattctttttatttactgcataaggttctagaaggtgagctggaaaggggaggaagatgctgccattagttaccaaattggcagatctttacctagaagagatgaaataaaagtctggaaacggtgacatctagtctgtgctctcaggctgcagagaggggaagaaacaacagaatcataccctctccaggaatttaagtccctaaacatggacatccaagtctaggaatgggaagaaagttaggaagaaaaaaatggcacagttcaaagtcagcacactttttttttcttttctttcttttttttttttttttttgagacagagtcttgctcttgtcgcccaggctggagtgtagtggcatgatccccactcactgcaacctccgcctcccagttttaagcaattctcctgcctcagcctcccaagtagctgggattacaggcacgtgccaccatgccttgctaatttttgtgtttttagtagagacagcgttttgccacgttggccaggctggtctcaaactcctgactttgtgatgtgcccacttccctcctgtagctggaattataggcgtgagccactgcacctggtccaaagtcagcacactttcatttcattgcttactgctctgtcccaagtgccaggcagattcgtgtcacccatggcagattcattctggatagaaagcagcccttcctctactcagcccacattttatatggcccagatgccccctcatgactcaacggaactgactcctcttcagaggccagactgcaaaatgcactgaggacccctgaaggctccttcttttttcctctcagggtttcacacaggtacagaggttctcctgggtaggccaggggagaagccacaactttagctcagagttaggttttgggtcctttttgcccacctctattggggcctaagtatacaactgttattagccagggttacattgaagatatttcacctttttctcccataacacttatcatccaccaatatactatttatccaatatttatttatttatttatttatttttgagatgaagtcgcactctgttgcccaggctggggtgcagtggtgcaatctcagctcactgcaacctctgcctcccaggttcaagcaattcttctgcctcagcctcccaagtagctgggattacaggcaggtgccaccatgcctggctaattttgtattttttagaagagatggggtttcac[133 bp omitted]tccgctactagaatccaagctccgcagggccagcttcttgattgttttgttcactaatgaattcctcagtacctcctacataaacatctgttgaataaattgtatgaattaatgagtggctaaccatacccgtgtatcactgcgtatcctcacgacttggacagtcatccttcctgacaccattgcattagctggaatgggttaggtcatgctgcagaaaagttagctctgaaacctcaggggtttcatacagctaaggtttacttttcattcatggctatgtgtccaaactcagctagcagtgggggtcaaactgacagtcactcgggggcctaaagtgataatattctgcatctagaatgttgctggtcactgcaggaccaggacagacagccagagggccacacaccagcttttctaagctttagcccagaagggacgcaagtcatttttgcccatagctgattacctcaaactagtcttatagttcctgtctaacttcaaggagtggctgggaggtgtggaggaatggatggaaaactgagggagcagcgctctctgccccatacccatgcaagcccattcacacccactcacatacattcacaccaatcacacccattcacacttatggatacccattcatgtccaccaatgcacagtctcacccacagccatcggtcctcacccttaacttctcttgctcactcagacccaaccatctgtgcaaaacccaactgatgccccaagctaacctcccatccactgttccacctatgccatgatattatatctatagctatagatgatagatagatagatagatagatagatagatagatagattggtttttgcctactggtcctggcttataactcccatagcccttactacagtctttagctatatggtggggcactttaggcctcagaaacagaatctctctctctgaccttcccccgtcctcctttcaccagccagggagggcatggaagctccacgccccttcccccatatggttgcagctcttcatctgtatcctttgtacaataaacaagtatgcagaattcagtgttcctggagttctacgagctgctgtagcaaattaatcaaacgcaaggaggaggctgtgggatcccagttggtcagaagcataggtaaaacaacccagggctggcaattggcatcagaattggggggaagtcttggggactgagccctaaacctgtgggatctgatggtgctttcaggtagatggtgtcagaattgaattggaggacacccagctggtgtccactacagaagcgatggcttgcttggtgtgtggggaaaatcccctactcctttggtcacagaagttttctgggttgattgttgtgttgtgagagaagaggaaaaacattttgagttttttccattcagacatacctgttctgtttattcatggcctaccacatctaattgtgcagactccattcgtcttgtttcttccaaatcaaatttccctttggcaataaagggctctctggatgcagcgctggatgtcatctttcaggatatgagaaaatctttgttatgttaaaaaatgttatggatttccacatgttagcagcaatgttcatagtacttattggctgagcaaatactcaatgttgaaaaagctaccgtgaattcggtagctctgtcgcccaggctggagtgcagtggcctgatcttggctcactgcaacctccacctcctgagttcaagcggttctccagcctcagcctccctagtagtagctgagattacaggcatgcaccaccacaactggctgattttttacatttttggtagagacagggtttc[132 bp omitted]cactagaaacacagttgtgcattgatctgtaagcatgcagtttgtgcaggttgcagacaaagcttggcacacatatggattcaaggatcctttgcaatggtgccacggcctgtgagttggaagccattaaggtagaatagtgctaatgagcaggacagcaaagtccagggaggttttcacttctcctctcgcttgctggcagaggaaagtggacctaacggcatgaatcaaatgtctttgctctaatagtgcctgattattttctgtaagcctctgtcaatactacgcttcagcttaactgcagtgggggctgggcatggtgactcacgcctgtaatcccagcactttgggagacctaggtgggtggtcacttgaggtcaggagttcaagaccagcctggccaacatggggaaactctgtctctactaaaaatataaaacaaaacaaaacaaaaaatgagtcaggtgcagtggtgggtgcctgtaatcccagctacttgggaggctgaggcaggagaattgcttgagcccgggaggcagaggttgcagtgagccaagatcatgccactgcactccagcctgggcaacagagtgagactctatatcaaaaaaaaaaaaaaaaaaaaaaaaaaagaaaacccaatttcactgcaccgcatgttgtctcctcatggacaaatcccatttgcaatataaacctctgcttgcaactaatagaaactgatatctagaaaatgtgatccattatctcccctgctgtggtctgctcacttccagaatttcatttcacatttgaggctacctgaagatgctaacattatgtcaagaatttcctgaaaatgaaaagaactcatttaggcagctaattatcaatagaaattattgatttctattggtaggtcatctgcagcgtggtctagcatcttgaggccagaaattcatcccgtgtgcaatggaaaactcggtatctctctcaatactgcaaggattcttccatgcactttctaagccttgccactgttgagttccttttttttttttttttttgtggggtgacagggtctctctctgctacccaggctagagtacagtgatcaaaggtcactgcagtctcaaactcctgggctcaaacaatctacctgcctcagcctcctgagtagctggaactacatgtatgcaccatcttgaccagttaaattaaaaaaaaattgctctgtagagacagataccgctatgttgcccaggctggtcttgaactcccagcttcaagtgattctcccaccttggcctcctgtctgctgagttcttgaccaatcctatggcttttctgaatgttctgttccttatctattctgcattgcctctctgcatagcacattacctcactgggcatttcccaacttctttactccccagactaccagcgggtcaaggctgtgtgtgaagcctgatttactaaaggttggggcaacggaagaagtttcttggagagtagcatggtaaataacataatataggtattagaaattgttgctcacgaatacctcttggttgttcccggatgtaagtaacttccactggtatttttgttttgttgggctcctggctccattgacttcttcttcctctctgcctctgtgcccccaaccctctctattttctcggatatttcacacagagcagatcagccatacatagctttatctgagtccaggtcttccaggttacacacagagggttttcttttcaaaaccaaacacatacaaaggttagtttctgtacaaagactctcctccttgtgagaactaatgatcagctctgcacgtcttttctccctttgcctgggatatgttcggtcatagattcacagaaggttgggctgagtgagacctcagaatctatcaagttaaactccccatttgatgcttggattccttctttggtctctgaaaagtgactgccattccctgcttgcacccctccagtgtcagcagtggtatggcttattttgccacctggatagtttatgcatcttcttgagctgcagcttcctatgctgtaaaagggagatggtagaatagcatctacctcccagagttgttgcaaggatcagatgaggtggtgaatacaaagggctctgcacagcacctggcacaaacttggcacttgatagctgtccactgttagtgtcctgtcaggggtagaaggatgcagcctgcacatggtgagctgatctgcccttgaacctgcttgttttcagctactgttcatgcatagcaccctgggcagtccaagacaagagtctttttttttttttttttttcctgagatggagtttcactcttgttgcccaggctggagtgcaatggcacgatctcagcccactgcaacctccgcctcctggttcaagcaattctcctgcctcagcctcccaagtagctgggactacaggcatgtgccactatgcctggctaatttttttgtatttttgtgtttttgtattttttgaggtggaatctccctctgttgcccaggctggagtgcaatggctcgatctcggctcacggcaacctccgcctcccaggttcaagcaattctcctgcctc[223 bp omitted]gttgtctctccacatgggaaaatctgattttgtaaaactacagaatttctaggaggtggtggcagtgggagaggcagggacaaggaggaggagttgtctgggaggttcgggggagcaagcaggggttggtggtgtgaacctgatcaggggcaggtttggccaccagtcttgatgggccctgagctatgtgggatgatggggaggcaatgaaggctgggccaggaagagacttttccagaatttttgtgacactatgatttgacctcagagagtgggctctgcctgaactatgaccctggccacagatgaagcagcagatgaagctgctacagccataggctgagtgccagtctgggctagtcacatttcgagtgttatctctgggtggaagtttgcatcactcagagccccctaccctcccaggggcccacactatggactcttggcagtggcagcagttctggagctggcagatggcacatgtctgcctcagaaggattcccagttctgtttgcagctcccctaggataccaccgatgttcccaagaggggctgtgaaattctcagataattctcaaaataaaattaattttgatacattttcatttaaaaataataagtgctagacagaactgtgtgggggaaaagctgcagaaggaagtcagaaaaggaagccagccaccacgttctgctgtccctggaagagccggcgggggtcccctccgtagcggccagatccctagatccatctgcaggggcccacaaaccccatcactccacctgtgatgtggggacctgggactcaaactccttggaggcagtgcctgtggccgctgaaaaatgctcattgcagatcccagtgcctgggatcctgaaggcatctattggacatcattacctccctaccttgcactctctcactccctttctctctgtgggactgacattctccttgctttttttttttttttttgagatggagtctcactctgttacccaggttggagtgcagtggtgtaatcttggctcaccgcaacctctgccttctgggttcgagcgattctcctgtctcaacctcccgagtagctgggattacaggcacctgccaccacgcccagctaatttttttttttttttttttgtatttttagtagagacgggggtttcgccatgttggccaggctggtcttgaactcctgacctcaggtgatccgcccgcctcggcctcccaaagtgttgggattacaggagtgagccaacgcgcccggcctctcctctctcttcttgcctcttccttctcttgacatctcctccctctcttcctccttaattctcttcagcccttgccttcctctttcctcttttctctaacactttcttttgtcttctcctctttcccctccttttaagtcctagaaagactggcttggacacagagatttacagattgcctggtctaacttcacccttctttcaaaaaatatcccccggcccccatcattttatttcattctcagagtttttgtcttttcctcgatgtctgattctgtttctgccccatcaccttgcttgtcttgctcctctcccctctgcttccctccctcttcctcctccatctctcttccctcaccctcctctcccctgctctctcctctgctcacttgctctatctctgtccttatcggtggccctgtctttgtccccatatgtcagagtctgtagctcttctctgctctctgtccctgctgccatgcctctggctctgcctgggtcactctggttctccctgtctcctccatgtcctctctctctcattatctcccccacccagttctgtctttgtctttgtccctgtctctttcatggtctttcctactggaaggctgagcggaggtcagagctcagcccttggttcttagtcattggggagaagctggggattgggggtgggtggaatctgacagggtgaggagtcctggcttcagtccttggttccaggactttggcttcgtcctacagggaccctcactcaaaccagctgcgcttgagacttggaggtgagctgcagagaagctggccaaggacaggctttcattgtccctgagggtatctgctctgagatggatattagttggcttgggaattatctcctggctgccacagtggattttctggagaaaggcaatgggctttcctgatctcatctgagggagagtctcggctcacagccctttgccttgcagcctcctgaaatgtctctctgccttaaggaatagaagaatacctggactggggggtgggggaggggtgtgggagaagaaagaaagagagagagagagattatttttcaggtaggtgtattttctgtctcttgaacctgaagtgaccaccttagtgtttccttctatctgtcagaatcttttttttcaagttctggaccaaatgctacttccttcttgcaatcttccctgatctccttcccctttctgctattcgccttttgtactaactcctccctctgcggaatcctaggaaacatggcttattcctcttcttttatgaaacaatttcctatttttgtccttatttttcagtaaatgacttatagtaggggttcagcttactgaaccctttctatgaaactgagtcagtttcttcttctctgcataagtggcagttctgtctaagtcagctcagctcagtcatcagctcatgggtgatggggacagccctgccaggctcttcctcacctacaatatcacctgctcaccaagtcctaccaattctttatgttagcactttttcctcacctgggtctatacaagttccacatttccatggggccactctgttctttatttggcaaaaacgggggctcagtctccatcctacatatggtggggaatacaaatgtcatgcctccagatctctggggatttggggagaacttccatttctcccggtcctgaccttcaatctcactctcatacctgtcagaccaaaactggtttctccaaaggacactagcataaggaatagggtgttacagcattttattaaccatctgggagtgatagaggagtttttaattgtgatactgtatagcaaatatgtttgaatattggacatttctgataatttggggaaaagttaatttttaaatttttaaaatctttttattttagaaccattccagacttacaaaaaaactgcaaaagtagcacaatatttccatgaacctttcacccagagtccctaaatgttaacatcatacacgaccacaatacaattataaaaatcaggcaattaacactgattgatacagtattattatataaactgtagaccttattcaaatttttccagtggttccattcatgtctttactgtggtccagaatacaattcaggatcttacgttgcctttagttgtcacagctccttagtttcctttgattagtctttgtcattcatgaccttgacacttttgaaggatacgggcaaactgtttggtacaatgttccttggtttgggtttctatagtgtttcctcgtgaggaattcaggctatgcatttttggcaagaagaccacagaagtgatcttatgtccttctcagtgctttctatcaggagaaacctaacattgaatgtccctttatggcttatgttaactttgattatttgataagaataagtctaccaggtttctccattgtcaagttacaatttttccattgatacttggagattatgtaagtatcctgcccctcttcatatactttcccactgatgttagcattcatggacgatgctttttttttttttttctgagacagagtcttgctctctcaccattgctggagtagaatggcgcaatcttggctcactgcaacctccgcctccctggttcaagcaattctcctgcctcagcctcccaagtagctgggactgcaggcgcacaccaccacgtgggctaatttttgtattttcagtagagaccgggttttgccattt[132 bp omitted]tttgccaaatggtaattttctatttccatcattccttctatttttattagttggaatttcattgtaaggttgtaagggagaactttcctttttttcctatttatttatttattcatgtttttattatatcagcattagcttgtggatacttattttattttatgaattataatccactacagtctttctctctctctctctcgctgtatatgtgtatatatatatatatatatatatatatatatactggccaactggcccatcccctagcctgactccaaacagaaactggtttacttggtgcttgtggtagaccaggtggttccctctccgacggctcctccattctttgcttgtgggtgcaacagttatgtgaaaaggccatgtcatttttgagttatctaccccaaccctagttctaagcattgattctgatttctttttagaaataagatggttaagattaggaagctgattggtttctccctgctacagtgtctccttctactaacccaggcataagctggtgggtgccaggccttctgatgaggagattggttcaggaatggacctgtggtccaaatcagaccattgactctaaggagaggtgggttatgggaaagacggttgctcatgggcctgagagatctacagaaggctagctcctctttctcaaaggtttgggatatagaagggacctggagctgctgcagccctttgccaccacgaggtaagctgacactagagaaggcagaggggagatgcagaaggcaccagctcctcgatgggattatcgaatgaccaaatccaacccatcctgaagtctgccttacctcaaggacttccaagttcatgagctgatacattcttatattgcttaggtcagtttgagttgcttttttttgacttgtgccataaagagtcctggcagatcaggctctgttggggctcttctgctgacctggctctccactttcctgctccctagtgatgcttctctgtcccaacaaagagaggtatgaggtctctgctctgctgacaagcctctagtgctgatgcagcattgacttgcagatgtggggggctttagaatcagacacctgggtgtttaaatccctcacaagctgtgggaccttggacaagttgtccaccctctcttactttaagttttctctcaaaaatggaacaacagcaacaaaaatcaacctctctctcttagggctcttgtgaatgagatgatgcatagaaaatctggcacgcagtaggaccgcagccagcttcacctccatgtccctctgctcttgcctcttcatcacagagggtgctctactgtgctttgagccttaacgtagactctggccttctggaggtcagcttcttagacttagaatgccagtgagtttttgaaaagaaaacaaatccctattgccagagaagatgaacagctcagccatttgctaaaacaaatattagttcagggctgtccagggagagcaagcagatccaagctctgcttgtattttgtatccttcgaggagctggtgcgtctgctgctgaggacaagcatcttgtggggagggtgggaggagggcagttgccctggaagctgttctcggcaccccacctcctgtccctcccgccggcattacttatcaggcatctggggcatttatcctgcgcctgccctctctgtgtctgcctgggctcatgttctggcctggggcctggagttggcttctcttggccttgaccatatccagaggatcgcagtcagatccactggtctgactggctgtgcattcagacaggttctgagaatggtcagggagacacaaactcccactcatgggtattcatggctcacattgtagtccagggtttgccagcctgtgtgctattgacatcgtgggtctggtaattcattgttgcgtggggctgtcctggacattgcaggctgtttgacagcatcccgggcctccacccactagataaacagtagcactcccctcccctagttgtgaacaactaaaaatgtctccaggctgtacctaatactaccctgggggaaaacatggcctctaatggagaaccatgattctagtagaaggcagcggagacagctggagttagctatatcttggttcaaatcctggccctatcactcaccagctgtgatattgggctggttaacgtaacctctctgagcctcaacttgtgaacctgtaacatgggaaccatgatagcactatttcataggacggctgcgagggaatgacatgagatcatttacagggaggtgcctgccccccggtctcctctctccatgtcaacctgcttgtatagactgtaaaccccacgagggcaggggcatgcctctgtcgttcaccgctgtgtccccagcccccagcacagtgcctgctgcgtgtcggcgctcaggaaatgaatggtattcttcgatgctctgggctttgctgaacttacactttactgctacttaatgctcttgacaaaaatccccttagctcctggcctccctgaggccgaaaatctctactcagtctgggttttatatgcttatccgaagctcacagttgcctcccttgggaaggttctagaaagcctgctcttgccctggcccactgtcaccaccctggagtcagtttgatggcagtggctccaggagcatcaagctccacatttccattgctgactcccagggcatcccctagaccatggatcattggcagagtggaggtgattgacatatcctgcagggcatcctccagaccatggctcattggcagagtggagatgattgacatctcttaggtccaatgccagggcatcctccagaccatggctcattggcagagtggaggtgattgacatatcctgggtccaatgaaagatcaagtcctttcctactccaatgaccagctccactcaccaccttatgaggctcccttggatgactcctaatcctgcaagcaggcaaattggtggacttcctatcatttc[132 bp omitted]tggtgaaaccccgtccctagtaaaaatacaaaaattagctggccgtggtggcgggtgcctgtaatcccagctactcgggaggctgaggcaggagaatcgcttgaacccgggaggcggagcttgcagtgggctgagatcatgccactgcactctagcctgggtgacagagtgagactccatctccaaaaaaaaaaaaaaaaaaaaaaaaaaaaaaaaaaaaaaagaagccaaattatgtctccagaattatttttaccaaaggaagtagggcatttcatctcaggatgatgtgtctagacctgtagtgaggcttatggtgatgggagggcaagataagcttttcctttgaaggtgaaaccgtgccccaaagggttagagaaacgaatgactaaatgtttgggcttacaggatagcagatgaaaaaccagttgcctaacagctgaaacagaactgtgccccaaagagtaagaaaccagtgactaacggatatccttgaatttgcaggactgcagataagaaaagaaaaaacttacagcaatgctgaaactcccttcccttgcaggataacagaactggctgaaatcggtgaaaaccaatacggctgactggagtttgcgcagaatgagcttgctaatgtcaccacctcaaattccactgcatgcttcatacttactccccctgaatgtgcacgtgcgatccaggaagtagtatgaagagataactgtgcatgccagaggactttccagcctcccatttccttccaccagtcacccaccaatcctagaatccattccctaaaccttttctaacaaaactgctgccctaaagctggcccagggagacagatttgagctggactcctgtctccttgttggtccacttgcaataaaaaggttttcttttctcaaaaatctggtgtcatagtattgacttctagtgcatcaggcagtgagccccctttgcttggtaacaaaggcactgccaattaagtagggaagtcaagacgaatgagacaagtaaagaacatacaagctccaaagtgatgatgagagattgtgaatggagctggagaagctgctcaggtgccctatcctgacttccaaatccccctccacctgctgtaccaccaccaccaccaccctgatttaggcatcactgcctctgacttgaaatattatgaatggctctgactggtctctctcctttcatctgcctcaaatctgcctccagagatatcaagctggtttttctaaaatgctaatctgattataccacagcatgcctggaaactgtttaaggtttattgtgatgttatctgcaatcatggaacattggaaacgattggggaatggttaaataaatggtggtacatatccgaaaatatttcatagccattacaaataatgttttaaaagagtaattagagacctggaaaaatacttgtaatgtaatgagaaactggattcaaaactatttggtatgataaaggtttagtaagtatgtccagaagtatgtccatgtatataattgcaagattggaattttatatatatatggaaaaaagtaacaatgattatttctagttagtaagatacagaggattttttatttcttctaggctataaactttatgaggtcagagattgtctatcttgcttattattaatttctaatcctttactaggtatcctgtactggtatttaatcctctactggtatatagtaggcaagcacttgaaatgttttatgagtggaattgagtatggatttttttttttttttgagatggaatcttgctctgttgcccaggctggagtgcagtggcacgatcttggctcactgcaacctccgcctcctgggttcaagcaattctctacctcagcctcctgagtagctgggattacaggcacccaccaccatgcccggataattttttgtatttttagtagagacagagtttcacctgttggccaggctggtcacgaactcctgacctcatgatccactcacctcagcctcccaaagtcctgggattacaggtatgagccactgcgcccgaccagagtatggattttataatttccaaattttgttcaaaaacattgtcttagtttgtgattccctagaagcagacactgagacagggtttgggtgcaagctgtttatccaagaggtgagctcagataggggacaggggaggtgacacagggaagggaagggagccaaactgtgtgttactcatcaggttaccacgtgggaagtggcagttcatcccactgggaagctctagaagactgcacagaacatgtaaaatatcagaggggcaaggaagccgtggtatttattctccagttcccacctgtgatggctgagggcagcacctgggagaggtgagcccaggtgcttgtagcaggacacagtcatcagagactggaatggcaagagctgagaagatgtaggtaggaagttgacaggctctgctacaagcatgataatttagaaataataagaaaaggcctggtgcggtggctcatgcctgtaatcctagcactttgggaggcctcctcacctgaggtcaggagtttgagaccagcctggccaacatggcgaaaccccatctctactaaaaatgcaaaaaccagctgggcgtggtggtgcacacctgtaatcccagctacttggaggctgaggcaggagaattgcttgaacccaggaggtggaggttgcagtgagctgagatcgtaccactgcactccagcctgggcatcagagcgagactctgtctcaaaaaaaaaatatttaaaaaatattagcatgtaattattaatggccttggggaagttccttaaggttcctgagcctgtgactttatattcaaagtagagacagtaattcctgcctggccttgctcttaggatttgaggagagtcgtgtgtgtgtgtgtgtgtgtgtgtgtgtgtgtgtgttttgtggactgaatgtctgtgacctcccaaaatccatatgttgaagcttaacctccaatgaacgtgattgtatttgtaggaagaaatgccagtggtctgtctcccctgccatctgaggacacagtgagaagtcagtcatctgcaagccaggaaaagagccctcattaaatccaaatctgctgacaccttgatcttggactttccagcctccagaaccgtgagaaataaatgtctgttgttgcttaagcctccctagtctgtggtattttgttatggcagtctgagatgactaagacagcatgtgtgttttaaagcaagaaagcaatataaatgtacctcatatttcctgggtctttttcagcagagtgtaaaaattgggttcttattaagcatcagttcccactcatggagcagggactccagcagccctggggtcagctcctcctagtgaactgcaagtgcacagagggtatcttacaggtgctctgcagtgagtcctctcagagaccctgtggagctgaatttctctccctcccactctctcctcattgtggtgatatctctgatcctgtggattcagaggagaaagcagtgatacagatgtttatggtgtctggctccagaccaccagcatctggtgctgaaactggtgagccttggtagcaacagaatgaaggacaacaccctcagcaccagcctgtccaaggctccagggataagatgagccaatattcccgtgaatctagggtgaccaaccatcctaatttccctgggactctcccagttttagcactgaaagtctcttgtcccaggaaactccccagtcccatgcaaatcaggacaattggttaccctactgctagtgtaagatgtgtgtggcaccccattcagttccaggctgggcacctcaaggaagactccaccagaaaatgagcatcaggagtgctgagcaaagcatcaactccttccctagcattttgtctggcttaaagcaccaggtcctccttcctagaatgaatccctagaactgtcctgagaagaccactatgaggatggcattgaagagtccatcacttaggctgagctgaaccattgacatgatcaaaaggcagctctgtcgatctcatcagtgtcttgacaaggagcattgggagccaagagccctgttggtagcctgtgctcagggctacaggactggggaagggagttccccggtggaagctatacaacctgcccttctgccattccctggcattgactccaaggagggtcatgacatgcttcagggatgccatagctctcaagcggtctgagcttctaactcaaagtgccttaagcggtctctttatacagtcaaaggctgggaggtcaatgtcaaactcctcttatgtctggagtcagaggaaagaagctacaccaagagatgagaaacacataggagaagagagtctgctgcggcatgagaagacaggcagggaggtacagaagatacgatgggagagatagaccgagcctgagtccctcatcccaggcacagaaaaactccgtcccccatcctggatgtagactcacctctctctggccacacactgatctctaaccttgaccaaaccctgagctctgacctttgactcttatcaaagactgagaccctggctacacactgactcttgacccctgggcagctactgggagagtcgtctatggactttgcaaatctctctttatgtaacagcagacacaggctctgtgttcatgcacgagctcggctgcttttcccagcgtccatcaatgccccaattacctgcaaactgctaacactcaaaggaattctctctgtgtattaattgggccaagcacacgttaatcaggtaacccaggccccctccatgcctgctggtgttattttctccgcagaaccaggtaatttcattgctgggcttcggtgaaagttgaaaagcagtgtcagctttttctgctcttaattagcgctgggctttctccggtaagtcactgatcattatcaatgagcttgtaattttatgtcccagaattagagactgatgattaaaaagaaaatcaaaaggctgtgttgcaggtccaatctccaaagacacgggcattctttcaacctccatcatctattccactgtgaccttttcttatagcttcaccgagacttcccgaattgcaacaactccttctctttgggaaggggagggctgtttcttcttgcccatcagcaatgtaggtggcagtggccagccctctggctggtggggagtaagctggtggcttgtatgggttctgaggtttttgttcaaagaggaggcacacaagggatctgggagctcttttctctccctcgctcccttttggttctgagcacgcctaaagctttatctgatctcacttctggggctttgtacttaggacagggatggttcatggaactctatcagaaccaaaccaggatggcagaggctcgagttccactgggctcccgatgcttggtcaggaccctgaaacccgtgcgcctctgtggggcatagcgggtagttttgcctgcacccactcccctttcttctggccacagcaccttactttgccccctcttctctcagtacattagttagggtgacatctccccccactttcagggatggtcttgaggctcagccctcactgattcttgtatgctcctttcctatggccacgagccactcaggaacaggcaggtaggtgatccaaggaggctcaatgagattcggttgtgttggaactgtgggagaagggaagctctctttgctgcagttgctaagccaggagggggtctgcagggagctgccaaagtgttcagtttgatgctgatttaaagaccacaccgtgggtggcattcgcgaaggggtattgaatggctgccatgcacttggttttgagagaatatggggacagaagatgcttcaaatattctcgagagggaaggaaagatagaatttattggtaaatctctaacagataaacctctaaattagtatactgaatacatcatccttccagatggaggttgctggcttgttcaagcctgagatgtgggtgcccccacccacctgactcccagccccactctctggactcccttctagtcactagagttctgtgttttctctctgctcacatatatcctcaggaggtggcacaatgcacctcagagcagggggttggagtcaggattcctgtttccatctgtttgggtcactaactaaatggctctgaataagcaacatatccaatacaaggttccattttctattttattttattttattattttattttttgagacagagtcttccgctgtcacccaggctggagtgcaatggcacgatctctgctcactgcagcctccgcttccctggttcaagcaattcccctggctcaacctcctgagtagctgagactacaggtgtgtgccaccacacccggctaatttttcatatttttagtagagacagggtttcaccatgttggccaggctggtcttgatctctggacctcgtgatctgcccaccttggcctcccaaagtgctgggattataggtgtgagccactgcgctcagcccaggttccattttctacactggctctgcttctcccacaaccctacgcaccctgccagacccccgggctgcactctgtcaagttgtcgtgaactcagactatcctggagtacacggaggagcttggggagtcgcccctcttctgagcattgcatcacttctggaaggacatttccctctggatactgagttaagaacagattgaaatcaggaaggacctacttagggcctcctcggtttttgacttcttcaatcgtaagcaaattgaggccaagactcccaagctgggcaaataagaccttggacatggctttctgctggccttacctccactgttagtaagaagggccctcgcaagcagagcacgtgagtagcttctgaaccccgagttgcccctagccagcatcatgatgctgcagaggatgaagctccagcactgaccaccattaaggtggcggcactccaagtctggcacccctgagcctcagtccctgcctctctcttgtcccaaagtctgaccacatctcagccgggactccagccttcatcccacctgcagctcagcaactgtgaagggttgaggatcaatgatgggcccagctaggaggggtttgagagctttcaccacctgttctgggatgcaatgtcagggaactctttgctggtccaggtttgaccttgtgtgaggacctgcagccccacctcaggagcgagaaatctaactctacttcctctaagactctgggcttcttctgtctttgtctgatctcaaagtttgtgcatcttttagctcctctgggcacctggaaacttcttatcccatggtcctagactatttgtattttgatcttccaaggtgttctcctgctaggataaggccctgttaccagcacagcatgggcatgtggtagatagtaatttggatagatgtgtggaaatgacgtggtaaaagaatggttgaatggctggaagtgtccatgaaatgataaagtaatgatgggtggataattgatggacggatgatgggtacattggtggattgatggatagatagggctcactttagcaatgatcagcttgcttgcagccccaggaccccctctgtcatgctccaatgccttgccctgctacctctgacccctagccagtctgtcccaggcccctgcccacctccctatcctttttcctggtgccccctgcagctgcctggtgtgtggtggcagatgtacctggtttctggttcctgccaccctcagatttggcctatgccaggaacctccagtagttccagtcctgatcaaagctgaggatacacttgggttagggccagtttgtgggaggctgggagtggtgtcctaaaatatcagatgcgtcagcccaggacctaccctgcatccgcctttcgactctccagaggggcaggctccttgcttctaaaaacttgcgttggtttttcttttatgaaaaaataatcaaagccctaatgtagttggcagagtttctgaaagtcaataggaaagaagcaaaggaaaggagcaagctgaggtggagataattctcaatgcctctgactgagacagatctaattaaaacaaatctttaaagcacagacctggaggccggccgcagagggagtggaaatctctgagatggacacttctcctggagttagctgctaatgttgggacacacaccctggctgctactcgtcttggctcttcccagagcagcctggctactgaggcaaaggactcaggcttcaggtacctgatctcttctccccaggaacccggaaccagggttttagggagacacaatgaatagcttgccaagacccccctaaggcagggaccttgctttcttgaggcttcatgaagggcttttttctgggtgcaagccttcattcctatggaatcgtcagtgcacatttgtcaaatgtgcctgtaattcacccacctctgggactctccctttaaacgctcccatctggcatcagcctcctgctgggtctcaccgtctctactgaactgcttccagtccctcctgtttgcaaccctaggagatactgatgcacatatgtgagctgacatccctcctttggttggatgttcgaagatcccctcatcactaacaaggcgaaaacaatggcatttaaaacccttggcaatttggctctgccccatttcccacctgtctgctaaacctcagttgtgattccttcaccattttttttttttttgagatagagtctcactctgtcgccaggctggagtgcagtgcgcgatctcggctcactgcaatctctgactccctggttcaagtgattctcctgcctcaaccccccgagtagctgggattacaggcatgtgccaccacggccagctaatttttgtactttcagtagagacggagtttcaccatgttggccaggatggtcttgatctcctgacctcatgatccacccgccttggcctcccaaagtgctgggattacaggtgtgagccactgagcctggccccttcacttttattttaatttgatcttattatttttatttaatgttattgggataaaaatcccataatgtgatattaactgttaaccattttgaaagtgtacaattcactgacatccagcacatttgtgatattgtacaatcatcacctccatccagccccaggacatttcatcaccccacagggatatcccatatccactagcaggcattctccattcttctcccactccccaggatgtggcaaccactaacacgctttctgtctctatggaatcacttattctgaacatttcatataaatgaaagcatacaatatgtgacctattgcatctagcttctttcacttagcatgatgtttctgaggctcgtccatattgtagcatgaatcaatacgtcctttttgtggccaaataatagtccatcaggatctagaaccagaaataccatttgacccagcaatctcattactgggtatatacccaaaggattataattcattctactataaagacacatgcacacgtatatatattgcagccctgtttacaatagcaaagacttggaaccaacccaaatgcccatcaatgatagactagataaagaaaatgtggcacatatacaccatggaatactatgcagccataaaaaagaatgagttcatgtcctttacagggacatggatgcagctggaaaccatcattctcagcaaagtaacacaggaacaggaaaccaaacaccacatgttctcactcataagtgggagttgaacaatgagaacacatggacacagggaggggaacatcacacaccggggcctgtcgggggtggtggggagcaaggggagggagagcattaggacaaatacctaatgcatgcagggcttaaatcctagatgacgggttggtaggtgcagcaaaccaccttggcacatgtatacctatgtaacaaacctgcacgttctgcacatgtatcccagaacttaaagtaaaataataataatattccatagcacggacacaccacatttagtttatccattcgttcatcaacagacacttgtgttgtttccacctctgccattgtgcatagtgctggcaataaacagtcatggacaaggacttgagtctcttatttcaaatcccttgggtatataccaaggagtggaactgctggggtcatatggcagctctgtattgaagctttagaggaagcacctgaaccctggtttctcgatgtcctctggacacactgtgcccttttgccctcagtgtcttcacacatgctgctcctcctgcattttatgcttgtccttccttccctacccgacaaacttctattcctcttcccagactctgctggagtgttagcccctttttgaatccttctcaccctgtgtgcaaacttagtgcaggtgctctaggctctgcggcggctctgctgcagctcttggaatagattgcagctgcctgtctgtgtgctctcccctccaggctgaactgggcattctttgagcatggagaccctgcctggatcatgtttacctcctcagtgccaaggcaggtgcttatgagcttatgagatgcttttatggggactgagtaaatggggggcccatgtgtgtggcatgggactgggattgctgggctcttcaacacacagtttctgggagcctgtggctgttgaggaccccaagtgccccagaatggcctcgcttggctccagggcagtgctcacatttgttctcctccctctcagtatgcggtggccggctgtcggccctgcgcaggcattgtcatgcttcattaggcttgcttttgttgctgcgtgctgaggttttcactgttgctaggttgtcttctgtttcatatacatttccccattttttttcctttggcaaataatcagcacccaattaattctgaatttcccattgtttgctccagctgtcgagctccttgcacgagcaaagaatgattgttcaatgttttccttgtaatgaactgtgagagtcggctgggtcacttctggttttgaggagaagagcgggtgagagacagaggcacatggagagcttgagaaacagagacaaagaaagaaagagagggacagagagatacagagggaggaaagaaaagaaaaatagagatggagagaaagagagggctgggtgaagacacagaaacaagcacaaagagacaagaatatttggaaatagatacacactcagaagtggacagtcccacagatgcacagagggaaatgcacttacaaagacacacggagagagagagacagagatcctttaacacacacagaccaacagggaaaacacagtgggatacatagagacacacaaagagataaggagagacacaggacagtgatagaggggccaagggagacagagagaggaagaaacagaccccggatgattgaatgatgcctgtgtgagtctgtgtagcagcagactctggtgtcagcataacagtgatcagattggacattactgagtgcccaccacatatctgacgctgtaacaggatccactcacaatctctctggaatgcaggcactggcatccctattctccaggtgaggaaactgaagctcagaactcaataaacatacacacggccacacagctagcaaaaggcaagaggaaatttgaaacaagcgtgtctgcctctaaagcccaagttcttaacgctcataccctgttgcttcccagaagacctgctcttgggtctcagttctgctactgaatagccagctgtgcagctgagaggtgacagcctgctggcagtcctcacagccctcgctcgctctcggcgcctcctctgcctgggctctcactttggtggcacttgaggagcccttcatcccgctgctgcactgtgggagttcctttccgggctggccaaggccggagccggctccctcagcttgtggggaggtgtagagggagaggcgcgggcgggaactggggctgcgcgcggcgcttgcgggccagcgcgaattccgggtgggcgtgggctcggcgggccccgcacgctgagcggccggcccacgccgccagcccccggcagtgaggggcttagcacctgggccagcagctgctgtgctcaatttctcgccgggccttagggccttcccacggggcagggctcgggacctgcagcccgccgtgcctgagcttccccctccccccgcccgccccgacctccgtgggctcctgcgctgccggagcctccccgacgagcgccgccccctgctccaaggcgcccagtcccatcgaccacccaggggctgaggagtgcgggcgcatggcgcgggactggcaggcagctccacgtgcggccccggtgcgggatccactgggtgaagccagctgggctcctgagtctggtggggacttggaggacctttatgtctagctaagggatggtaaatacaccaatcagcactctgtatctagctcaaggtttgtaaacacaccaatcagcaccctgtgtctagctcagggtttgtgaatgcaccaatccacactctgtatctagctactctggtggggccttggagaacctttatgtctagctcagggattgtgaatacaccaatcagcactctgtatctagctcaagatttgtaaacacaccaatcagcaccctgtgtctagctcagggtttgtgaatgcaccaatccacactctgtatctagctactctggtggggacttggagaacctttgtgtccacactctgtatctagctaatctagtggggacgtggagaacctttgagtctagctcagggattgtaaacgcaccaatcagcgccctgtcaaaacagaccactgggctctctgtaaaatgaccaatcagtggatgtgggtggggccagataagaataaaagcaggctgcccaagctagcaatagcaacccgttggagtccctttccacactgtggaaggtttgttcttttgctctttgcaataactcttgctgctgctcactgtttgggtccacattgcttttatgagctgtaacactcgccgcgaaggtctacagcttcagtcctgaagccggcgagaccaccaacccaccaggaggaacaaacaacttcagacgcgctgccttaagagctgtaacactcaccgcgaaggtctgcagcttcactcctgaagccagcgagaccacgaacccatcaggaggaacgaacaactccagacgcgccgccttaagagctgcaacactcaccgcgaaggtccgtagcttcactcctgagccagcgagaccacgaacccaccaaaaggaagaaactccggacacatcctaacatcagaaggaacaaactccggacacgccacctttaagaactgtaacactcaccgcgaaggtccacggcttcattctttaagtcagtgagactgagaacccgccaattccggacacacagctacagccaagcctctttgcttctctgggccagcctctctggagctgaatcgtggctggctggatttgaggagcctgcatgggcgcactctctctttctgaatcccagctagggctctcctggctgtaattactaagactcagctgctgggaatttccacgcctcctacctctctacagggcagtccctccatattaggaaacccactggcacgctccgccgttatcttcgcaagacttccgttgttgcctcaagttgcagattgccttttaacagagaagaaagtgacaggtttgtttctgggaagggatgtgtttgcgatcagggaggacgggacggttgtagcttgggttgagatgcacagacaagcatcttcgaacccacatcaggtgggacaccccgtttgctcccaggagggctactgcggggtaggattaagtgcttgttaaagagaagagctgtggttggtgcggtggctcacgcctgtaatcccggcactttgggagactgaggttggtggatcatgaggtcaggagatcgagaccatcctggccaccatggtgaaaccctgtctccactaagaatacaaaaattattcgggcgtggtggcgtgcgcctgtagtcccagctactcagctactcagctactcaggaggctgagacaggagaatcacttgaacctgggaagtagaggttgcagtgagccgagatcgcaccactgcactccagcctgggtgacaaagtgagactccgtctcaagaaaaacaaaaaccaaaaaccccatgtggaaggccttggggtggggtgtgtgcgtggggggatttgcttccatcatccggctcatccagcacataatgtttgttatatcactatctaatgtacaatatatcttatttatctgatttgtctgtctctctctctgtctagaatataaaccccatgaaggcagagatttttgcctgtttttttcatatataatatgcacttaaatgtttgttgaatgaatgaatgcgagtgtgtatctatcatgaatctcaggccgtcgatagtacccaaattttcttccctctggctgaggtgggttgggggattccggagaagctggagaactgttgtagtttctttcaagagtaacaccccagaagctgcagcaaggttttgagcagtaacattccatttgtgttttagaaagatgtctctgctggcagcgtggggggcaggctggcttggggatgctggaggctggagctctaagtagaggatggtgttatccaagacccggaggcatcaggacctgcaaaagtgctgtcaaaacaggaaaatgctgtgaactttaacaaaattgtcaagttcaccaacttttttttttctctgttaaagatcttgcttgcttgactggtttttccaaattcccagagcttctctgaagtcagtcaatatggcattattgtcatttggggaacagtaaacctttgaaaaatgccttttgcgttctggatttgtggaaaccgtttgaaccgtggtgagtccttcgaaacacagtgttttgattttctcaataatttcttgaggatcattagaaatgggaattcaagagttaggatggatttttcccataggctgcatacatgtcacaaagcatgatttattgtggcacttcaataagaacttatggaacaggcaaaggtgtccactcagcagcccttaggaagctcatttttgaggcttacgggtccgctgttttccagacgccaggaggtgtgggcaagagcctgtctcagggtgggaagattgctcttggtaactcatgagtccttcacacctggggttgagccacctccaccccccagcctccacctccaccccccagcctccacctccaccccccagcctccacctccaccccccagcctccacctccacccccagcctccacctccaccccccagcctccacctcccactgctgcatggagccctatcagaccaggtgaccctcaagcatccttcaaagcctgcaaggttttgggatttggagttcaagtgcaaactcatttagttcatgccttactagtcagtgcccagggagatagggagtaggtggggttggtcgtgccagggtctgggatggtacaggctggtctggagtaggagggagtagaaagagaataaacttgtttcctccttttttatcccttccaaggaaggattgaaagggtatgtccaagggcattatggaaactatggctttgccagaaggtgttgatgagagagacagtcacgggtgactgaggccctggctgtggtcttcactgccatccctaagaatctgttttggtattttatgtgtggcaggaaagaaatcctatgttctcaccagcctcactagaccctgatgtctagtgtggttctgcacacatgctgccagtcccttctccgagctcctgcccatgctgcgccttctgcctcaaatgtacttcctcgtgcacgtggctcgaatctactagtgttttaatactcagcatgggagaaccccctctgtgcttcctaggacttgccccagcagagttaatggctctgagtgccctttatacagcccgtatcacattgcaatgttgcctgtttgccctcccaagaatgcctgagggtggagaaaggtctcatacattcttgcagctccgaaggccagcacaggggcaggcacatagtaaatggtggttgaattttactaatctgtccgggctcagagtcctgcagacctgagtttgaatcttctctcctgacatttgttagctctgtgaccttgcgcgaatcaactggcaagctcatcagcctgtttcctcacctctgtacctgaccaggggaaggttaagtagatggaatgggttctataaactgaaaaaacaaaaacaaaaaaacacacatataatacttattgagccacctgttatgtgccagaaacagccctgagctctttacatgtataaactctctaaattttcacaacaaccctacgagctaggtactattgtcatctaataataatgtgaggaaactgaggtgcaggtgttaagtcactggcctacgaccacacagctagaaagtagcatgattgggatttgaacctggagaaggtagctccaaagtccatgtgcctaaccataatcccagctccccgaggacatcgctattaatatttattgagtacctactattggctgagcactttatttcaactcatcctcacagaaactcaatcaggtattattactcttatatgagagatgagaaaattgaggctcagagaggttaaggagcttgtctaaggtcacaccggtagtgacagagttaagatgctagctgatgagccctaaagcctgtgattcttttctattcctttctcatttcttactcccttaattgtattgcagaagaaacagaagaccagggaacaaaggtgttttgcctggagccatgcagtggcttcttggtggagcaggaattaagacttagccttggttaaccacagctttgcaacaaccacctcctgccaaaccttagtgactcagaactatagtaacatcttattttccttgatttgtgattggctggctgttctgctgctggtatttctgggctcactgtgttccctggatggttgggcgggctggcctcactgtacatgtctggctgttggctgggttcctcagttaacctccatgtggcccctcaagatcagttttcttacatagcggtctcaggggagaaagagggagaaagcagaaacagcaggacccctcaaggtctggcccagaagatcctggcatcacttggactgaattttattggtcagtgcaagtcacaggtgagctcagatataaggagagggaaaatagactctgcctcctggagggaggagctgcaaagccgtcttgtggtaaata[137 bp omitted]catggtgaaaccccctctccactaaaaatacaaaaattagccgggcgctgtggtgcatgcctgtaatcccagctactcgggaggttgaggcaggagaatcgcttgaactggggagatggaggttgcagtgagccaagattgcatcagtgcactccagcctgggtgacagagtgagattctgtcaaaaaaaaaaaaaaaaaaattcctagagttcctgactcccagcctggtgctctttcccctcccgtgtagttgggacattttgctcttcttcagcccatgcctggtatcggtttattgtactaaaagactcggtttagcttggcctagactttttttcctgagtcaagtagtgcagggctcagggaggcctcaggctcctgcaacttgcctctccattccgaatcccttggtgatggccacatttggctttgagtgtccttgtggtttgggccaccccctgatctctgccctctccacagctggtctgggagggtactgctcattctaatggcctgggtcaagccagcttcaccccatgggcttctgacctcctttctggcccttgctgtcctgccctgccaaaagggcactttattagtaagtgagatttcctggaaaacctccaagggcctggaatgactgaatatttcaggctaagtgggaaaaactacctgaaagcacagaggatgggaatgagtgtccagggcaattaagaaaaaatgtgcaaatcttggttcccttttgcatttcaggccaagagggggaactctggcctcagaagaatggccaggaaaaaacatacaccttgagctgggttcaaatcagcaaaacttcagcaactgcttacttctggccaactcaggtcacctgcagccaggtgcaaaggtgtgtgccagaatgagagagactgtatttcaggaaagatttgtgctatgtgaggcgctgctgttttagggatggagggtgatgacagaagatttgtaaccctttaactgtgatgcaaaacagaatagtgaaagaaatcccccttctgggtgtatatccaagaggagcaaaagcaggggcttggacagagatttgcacacccatgttcatagtagcgttattcacaagagccaaaaggtggaagcttaaacatgataaagttgctaaattatatatgtatgtttttacctcaaatgctttaaaaaaaaagtgaaaacaatccaaagtgtctattaatgggtaaacaaaaggtggtattcaggcttcaaaagaagtgagatcctgacacatgctacaccatggatgaaccttgaagacattatatgctgagtgaaataagccagataccaaaagactgtatgattccactcatacgtggttcctagagtggccaaaatcagggacagaaagtagaatggtgatggctggggtgggggaagcggggcaagggggagttggttaatgggtacagagtttcaattttgcaaaatgaaaagagttctggaggtggtggtgatggctgcacagtgtgaatgtgtgaatgccactgagccgtacacttaaaaatggtcaagatggtaaatttgatgttgtgtatatttttctgcccaaaaaaaaaaaaagatccttagaagtgcaatagaaaaaaaatgtgggaagtggctggttacatttccaggccacgtgccatgtgcagagcgggactgggaaagtttcggggacatcaggagggagaccctggacaaaggaggggagtgcacagagcaggttcattctccaaagccaaggtcaaggtcacactcctctccacagacccaactgtgagtcctgagatgccccagacaattaaataaggcttgaatcaaaatgatattttactttgaaaaaagaaaaagcaagaatcacaggtgttttctttccaccctttggatatatggcatctgactgtgaatggtatgtaaccactttttaagggaaaaataggcatgtatgtttactagtgaatcaagcaaaataaaaatcaactggccacattggccctgaccttttacttaccaccttcttcccgtaggaattcttgctcttggagtgtgtgccgtccgagagtctccacactgaaatgttctttaatccagggcctctttgacattgttctgcacaggttctactatgggaatgcaggaggttcatctttaggatctgtttgccttcatcaacatgacttataaccctcgtgcttcctccacagatggcacagccaccttttgctgtttcttaatccagagctttcatttaaagatgataaaagaaaacatctgccgggcacggtggctcacacctgtaatctcagcactttgggaggccaaggtgggtggatcacctgaggtcaggagttcgaggccagcctggccaacatggtgaaaccccagctctactaaaaatacaaaagattagctgggcgtggtggcaggtgcctgtaatcccagctacttgggaggccgaggcaggggaattgcttgaacctgggaggcggaggttatagtgagccgagttcatgccgttgcactccagcctgggcaacaagggtgagactctatcacaaaaaaaaaaaaaaaaaaaaaacttgggcagtaaaagagctcatgaagcaccatggccagccccccagagaggggaacactgctttgggaaacattttctagtgatgctgcaaatagcatgtgccctgtgactggccttcccgtggtgctgtgagtctgtgcctgctcaggcctccagcatggtgacaggcagttgaaaccaccactttgtttccaaaagcataaaaggattatgcataaactgagaggtgggtggataagcagagacacagaaactccagagtgtgaatggtctggttggggttgaggatgaacgtggggaggtgaggagtaaagagggacagggacccacctactgtgtgctgaaaccccagtaggcactttctaaagtctgttcacttctcaccacagtcttgtgagttaggagtttatgacaataaaatagttgagggccggttgcagtggctcatgcctgtaatcccagcactttgggaggccaaggtgggtggatcacctgaggtcaggagttcgagagcagcctggccaatatggtgaaacccagtttctactaaaaaaaaaaaaaaaaattagccaggcatggtggcgggtgcctgtaatcccagccactctggaggctgaggtgggagaattgcttgaacctgggaggcggaggttgcagtgagccgagattgcatcatggcactccagcctgggcgacagagtgagactgtgtctgaacaaacacacaaaaaatagttgaggaaagtgaggcccaaagtgtaaacaactaattagttggggatgaggatctgaaatgtctggatggccccatagtcaactggttctcactcccatcacattgacacagcttctgctttgaactttaacctgtgagccacaggcaaccaccaaagggttctaaataggggagtgatgggttcagaactaagttttagcaaaagccctctggcagaaaggtggatgatggatgggagggagtactggggctagggggcagagaccagttctgagatttactgtagactcagtaaaagcattggaagtagggcaggaaatggaggtggggtggggaagatgtgttaaccataatcgtatattgtataacttggttcttaaaaaacatattgggaggtaagaattttccttgctgttttataaataaggacaccaaagtcatatgaccggaaggctcccagcctggatctgaacttgagtgcctatgactcaaaggctcctgtaatttcctctaagccacctcatgagcgctcccgcgtgggcggtgtcagattggatccagacgtgaggagaaaggcaaggtagagtggctttagagatatagaagtaagccgcggtggtggagttcttacctggagaaagagaaatcaggagggcgtgggtttggacgcagcagggtatccagtggaaacactaagccagcagctggaagtggaagttagaggcctgaagtctggagatcgcagatgggctgtgggtttgagagtctgaagggtagacctgctgtctgaaggaatgggagtgaagaggagagaggagatgtgagagagaaaaaggagagacggggaggaaagaagaaagagaagagagatgctgatagggcctcagggatgctggtgcccagggggtggtgaaagggaggaggggagagagatacaaaggagactgagggtggggtgaggcatagggaagtcaaaccagggaagagtgtgaagagggaggtgaccgccagtcaaatgctgcagagaggggaagaggataaggcagagtgggtgcctgggaattgagcctcggtggttgggggtcaggggtggggttggaaagctagtgaggaaggtggaccacagtactgtgtagatgcctggacgggggctgcctgggatcctcctctgagggtcttgcctggggactcaaaccaggattctatagacaacgtcttcacgtggcaagttatttttgctgtgaacccacgtggtcgcgcctggtaattatagggtaaaaggaattaagcaagacataatttctccccatcaaacctgactgttttacgtctccacctcgcaccggcaggcaggctttctcccttcacaggtgccactttgatttcagtcacgttggaaaggaatttgaaacatcttcaaagtgattaaagagaggaagtcattgcaaatgtgggctaaatgtaataatcacataaactgtttatggccatggagctttcaggagggaaggccttgtggtagctgacagtcggggtggggctggggctggtgagaacagtggtggcagaggtggcgacggcactgcaggtacaggtggaggatggctcaggtgcaggtggaggatggctcaggtgcagatgcaggtgcaggtggaggatggctcaggtgcagatgcaggtgcaggtggaggatggctcaggtgcagatgcaggtacaggtggaggatggctcaggtgcaggtggaggatggctcaggtgcagatgcaggtgcaggtggaggatggctcaggtgcagatgcaggtacaggtggaggatggctcaggtgcaggtggaggatggctcaggtgcagtgcaggtgcaggcacagatgcaagtggggatggatctaattgtaatattaattattattattacagctactgttttttgagcattactactcccttagtgctgtctcctttaaccttcattagagcctcatgaagtgagcatgatggtccttataataaggggagcaaggtccagagaagttcagtcatttgttgaagacacacacctaggaaggggcagggtttggatgtggagatagtcccatcccaattcaaaaccactcagcctcagcttcactgtgtggggtccatggtccacgtctgctccctatggcatcccaaggggactctttcatgttcagggaatttgacctttgagtctagacctgggactgagtgggtgaaaccctggctaataattcaccaaagactccaagacataagggtactcctgtgactccctccctccatgcaggcaaggtcttgctctgttgccaggctggagtgcagtggtgcaatctcggctcactacaacctccacctcctgggttcaagcaatcctcctgcctcagtcccccgagtagctgggattacaggcgtgcaccaccatgcccagctaatttttgtatttttagtagagatggggtttcaccatgttgaccaggctggtcttgaactcctgacctcaggtgatctgcctgcctcagcctcccaaaatgctgagattacaggcgtgagccactgtgcctggcctcagatgcctttataaagcaactttagttttgcctctttaaactcactttgtaggacttgttttcccctgatcctaatgagatctccagaaggccctgcacttctctgaccacatttagatcataaaatgttatctggttgcctcagccccttggacagtctcagttcagtaattagtatgtctaatctggggcaatacccaaggctccaaacttcatttaaagcttgcaatcaggaaagggagttgggggagatttttctctctttactccctgcaataggttcctattgaagctgcatcaaattatcatgaacttagaggcttaaacaacacagatttactgtcttataattcttgatttattatcttgtggttcaaaagtccaaaatgggttgtcaggacagtattcctgtggagggttctaggggagaatctacttctttgccttttccaggtctcagtggctgcctgcattccttggcttgtggtcccgcattggtctgacaccacttccagtttcgtacctcctttccagtgcatgctttcttgacaacgaatcccctaattttgtattatttgcaaaattgtggataggctgagaatctcccaattcctttttcttgacagttctctcctcgatttacctctttcctctcatgttttactataagcagcatgaagaaaacaggctgcaccttcaacactttgcttggaaatctcctcaactaaacattcaagttcatcatgtataagttttgctttccacatgactgtaggacacagttcagctaagctttctgcttctatgtaacaaaggtccactttcgtccagtttctaataacacgctcctcatttccttctgagccctcattagaagcatctttaaacttctatttctgccaatgggctgttcacaatgatttgggtgtttagtaaaatgctacatgttttattattgtgctccttatttccttctggtcattcatggtggaggctttaacatccatcttcctattggcagtatgttcaagacaatctctgctttctctattgtgcccctcaatattctttcatcctctgccaactgcccagttccaaagccatttcaacatttttgtgtatttgttatagcagcacctcacttctaggttccagaaatctctatcagtcagagttcaaccagagtaacaaggccaatgggagataaatattaagagatttattgcctgaaattggcttatgtgattgtaggggctgcctaggcaagcctgaaacttgtagggaaggcttccaggaagggcaggatggaacttgcaggcgcgagctgattctgctatctgcaggtggaatttcttcttctttagggaagtctcagttctggtcttaaggctttcaacttattgaatcaggaccactcggattatctggaataacctcccttccttaacatcaactgattatggactttaatcacatctacaaaataccttcacagcaacacatggattcatgtttgtttgaatacgtggggattgtaacctaaccaacttgacacataaaactgaccatcaccctcgcccattctcctctcctcatcccactagctaatgagggatgagtgaggctaggaggtgtggactagggtaaggaaagaagaaaagggcagggatggttttcataactgtgtgtatggggtgaggggaatctggcaattatttcctctgacatcagctgctgtttagagccaagcctttctctcataggtgctgctgagagtttttcagacccctggtattatcaacctctgctggataatgctgcataacaaacagctccagaactcagtggcttaaaaccagcatttattctcatggtcatgggtttgcagctgtttggctggttcagactgtttggctggtgggtctgcttcaagctatgggttcaggtggctgtggctccaggttgtgggtttggttcttggcccctctgtgttccctgtagggctcaggcccaggttcatcttctcaagatggatcactgggacaccagagggctagccctgccacatgcaagcatatttgcagccctgccttgctcaccttttccctgctttcagaatacccctttggccatagcaagtcacaggcctagctcaaagtaaaggagcaaggcacctgtgagcagtcacctgtgctcaccaggagtccatagccaaactgtgactattataaaggagtgaatcatcgtgacctatgatgccatatactaccctcatccctattctgggatctcttttacttgcccactctctgtgggcagtttatgacattctctgttgacttctgattcctggggatgctcttcctcacgcagactgtcttctggggtcctgatgcccctccaggcagccctctgggtaaatttcttttaagaccactctgaaccatctcacctctgctctctacaatgctgccacaggctacttcagccaaccttctgtcctttaaaattttcagacacaagtcagacacccatccactccatcccccaagctccacgggaatttgcagcaaaaccccttgaagcccctttcactagcaaccctcaacctcccccaagagattcctggagtctccatgcctggccaggttccatttgtgcaagaaggatcaattgccaaatttgaagtaattggaatttttttccctctagtcacagtcatttttctcattcccagtcaagcatgtcccctgtgctgcctgctttttgccggaccctgcatttgtgtttggagatgagacatttcctgtcagccccgttgtgctccactgagctgggtgctgtgtgagctgttcattaagactgcctattatctcggattcccttcggttgctcagagcaatttattttcttcctgaaggaaaagaactttggctcccccaggcctcaaacccagaggctttggacacatgggcaccaaaagtttagggtggaaagttctggctggtggctggatgcacagatgacacccagtcacatagaggattacttgggacaatcacagggcagatgtgaacaccggttacatctgcaggtaccagccaaatgaaatgaagtgtaactatacagtgttagggaaatttaaaggattgctatttctactgggccagatcgctacttcccagcatagaagaataacctctgatgtcaaatttaaatagcctgttttatgcttctgtgaatctaagtacgaagcaagaacatttaggctgaggaacccagtcctgccggccagccatctgtgtttcttgactgttccccaccatcaggccctctcagagtggtggcctggcatggtcccgttgggtaactggtatcttttatccacgacacggggagaagctgggtaccccctacaggaagggagggagctcacgtggcttcccacgctgtttctgtgctggaaagttccatggttcagcagttctgctggcctccataggggacagtctactggtggcctcatcttgccctaaccagtcgactcatcgttcaagtccccagggaaaatcctggctgaagcctcctcaagaaagcaggtgtttctttcttggtgctgacatggtatgagttcccctatttgctgtgacacttaccacatagtgctgtagtgactcgtgtgtttatctgtttctccttccaagctgtgagcaactgcaggcctggctttgatgtatctctgcatcccctgacacacagctgaagctcagtaaaccctggctgaagagccggagacaagaggagaggaaagggaaacattgtctttctccctcagcatctaaggggcctaacttggacttctaagtgaggctgaaatgcagccttgtccaggtttcagtggagttgccagatggcttggtgtttgtcagtggctttgaggtgattaattggacgttgttcttctctcccggtgggtgcctgagcctcagccatctcatcacagctgcacttacctggtggtaaagccaaggtccagaagaagcgagcagcagttgactgcctcaggcaacccaggctgctgggtggaataaactggagaaaaagaacggtcaagttatccgaatgatgagctgactgttttcaaaaattaattgtttcacctccctcgagaagtttatttggaggggccaccttcctccactggggagctgggtctcgatgcatgagaggcaggatcaaacactacagtgtgttttggggaaaagtcagaaagtaggagtctctgtattgcttagttgtgtgaccttgagcaattcttttccttttctgggaaattcggtttccctctctgtagagtggagtggttaagagtagtacaggctccttagattccatcttgctactttctactggtgagaacttgggaaaattactttttctgcaaaatggggccacgattagaactacttcattgggtgatagtgcatgttaaatgagttagtagatagaaagtgctcaggacagtgcctccgatgtactgattgcagtgtaaatgtttactgttgctatcatcatcgtcaccaccatcatcatcattctcagattaggtcatcagtccctaccactgtgggtctctggactggggtggtctgtgaggggagctttcaccagctagtcaaagtgagacacgaatgtccgcatcatgtacatggaaggtggtcaacatttctttttgggaaaagttgttattttattctgaaacaatgtcctttctacgctttaagtgctaaaatatcatttttaaatgaaataataattataatttaaaaaatgtcctatctggcaaaacaagaagctggtggtacccaccttgggggtttgaggcatcacatggtccaatttcctcattatttatatgacgcttctttgagggcaagagagttggccaaggtcatgagacagtctcaacccaccagatatcggagaagtagaccctggtccttgttaggtttgtttatgtatttatttgagtcttggtctgtcacccaggttggtgtgcagtggcatgatcatggctcactgcagcctccaactcctgagctcaaggaattttcccccttcagcctctggagtagctgggactacaggtgtgcaccaccatgtccggcttattactattattattactattattgactattagtttatagagacagggtctcattatgttgcccaggctggtgtccaactcctgggctcaaatgatcctcccacctcggcctcccaaagtgctgagattacaagtgtgagccactgcacctcgtcccacttgttggtttgaaatggctgtttctgtgtctggtttccttcctccaaaggaaaggaagaaagtgactatgatatcctagtgaaattctcctcaaatcagtagtatgatagaaaatgtaactaggagaaattgtagaagtcaagttcaattccatcgaaacttcactgagcacctacgaatgccatgttgcatgacaaccaactcctattaatgccatgttgtatgacaaccaactccagtcctgccaccacagcctctctccaacatttactgtacacataggaagcaccagacatggtgataatgcctcacgtggattatctcactgtcttctgaggagtatgaggtatgtatggttggccccatttcacagaggaagaaactgagacttggaatagtgcaggaccttgcccagggtttcacagtcagaagtgggaccaagagaagtctgtttgacaccaaggttgggcttccagcccccatatcatgctgtcattgtgggcaccacgcatggctccggccgtacccagagttggtgactaagtctgagctcacatgtgtgattatgtgattcgtgtctgtcctcagcagctgctccagggaaaatagagtgagaatgccttttgctcaccccttatcttcagcacccagcatggggcctgcctggcacagattaactgatcactgaatactcgctgattggatgaatgagtgaatgaatgaatttgttgagaatcacccaggaaagaattctgcccccaccctgcctccaagattctcattcaagaacttgggagggagcatataagtctaccttttaggccaggcgcggtgcctcacacctgtaatcccagcatgttgggaggccgaggtgggcggatcacctaaggtcaggagttcgagaccagcctgaccaacatggcgaaactctgtctctactaaaaatacaaaaattagcctggcgtggtggtgggtgcctgcaatcccagctactcgggaggctgaggcaggagaatcgcttgaacctgggaggcagaggttgcagtgagctgagatcatgccactgcactccagcctgggtgacagagcaacactccctccatctcaaaaacaacaaacaaaaaaacccaaatctaccttttaagttctgctcatgccccagaaactgccctctaagacacctggctgtagggaaatgggtttttctaaagatcaggcagggagaccttggtattttattctgcaggcaatggggaatcactaaagagggatttgatgaggggatgggaagtcctccagagctgcgctttacaaaaattgccgaatgactttgcttgtccccttgcctagtgatgccccctccctttttttttttttttctgtcaagactgattctgaacaagagagattcaggacaaacatctccgtgctgccgctgtggagcagtcggttcactttcagccttttgctgcctctctgacagcaggcggcccgttaggggctccctgaccttccgcaatggattgttagcgcatttgagccctttgtaggaggatttcctctgccgtaattggaccttcactctgttgcgcttcctgaccacagagcttgttagctgtcaggcaagactgtgaatttgcacaatggccagcgaggctcatttttcataggctaccctgccacgggagcaccctatggaaggacgcccataatgcaggaatacgccgtattgtgggggaggagagaagaattagggcccaacttgggaatggggagcatgacaaaatgaaatctccccgctgggttcccatagaactccgttcagtcaggtgcatgtctgccgagcgtctgtgtttaaggctatcgtgctgggtttgctgtcaacccagttactccaagggaacaatgacagcttcttccagttctctgactccttcccaggatttcttttagaaggaggttcatttgagcagtctgtaagcatgaggggaatcactgggctgaatgggagctagtgacagggccagaagtggaactcagcttgttgctgcccagcggagaaaacctgtgcttctacagtcctggctcacttgcagaggggacattgcggaatcctgcgtctatcctaggctcttagatcctgaattttaggagaggatcctacgtgtttttccccctgcttctttgcctgacatcactgaagtgaccctaggctctgcagagctgccttggacccagggacttagtaaaaactgtatttgggggaatgagaggaagctttgtgaaaagagaatagaaaggaaatacggggaagacggagggaaaacaggaagattctgcatcctcaggtttgccagtggccttgtagacctgagctatgagagacgaatagagatcgtgaaaccaggaccatgagtgatgggcgttgggtgggcaccagcttcggggagggcgaggcaggggcaggagagtagatgtttataaccagactttgctggtgcttgctattctctgtgcacccctgtcctataccctcgaatcctgtctgccctttttgcctccctgacctgtgctgtgccccaggaggacatcacccagggtttccttgctgactatctgttgggtttggccagtgaggcactaatagaagattggagaggggagagagaaagagagagagaggatgaggcggggctttctctgaccctccttgctctgggccatgttctggaagttgctggacccgtccatgtcctgtctggtgtcatcttcagtggctctagctctcactgggtcccagtcatatttctttcctcttctcctttatgcctatgggtggtgatgcctcacaattcctgccgcaacactgagaggagttccttaatttgagtttcttcctttgcatcatccctgttggattctgtgtcctcatggggtctgattgatgtagggcttctgtttcctgggcctcctcatcttgggcatggctttgttccctagatagtgagctgagtatggcttgctctaactttgaagaagttcttggcacaatgaagggtaggatagaggctgtgaggagaaagagaggcttctggaggaggttgtaagaaaagccttggggccagccctcagggctaggtccagtgggctattcggtcagtgcacttctcaggaggagtctgtgtggtacccagctcttgggctcttggcaggtctggtggtcataattgaaagtccttttgctggagagaggccagatcaaagctaccttatggagaagactccgttggtatttaaaatgtcagaatgacatttctgataagaaaatcagaggcctgttgaataatgttgacgtgggaaacatttcctttgaggtgagaagcacaatacaagcaattaaggctgaagctgagaaatagcaggtatgtgaggcctgcgaagtgagaatgcctgtggaaaggtgtggctgggacgaccactggagagctgactctcccgcctggatgaaaattctggggagggactcaatgtggaagccaaacaaatgaaagatccatacagctcttgggcgagaaggatagaaggtttgtcacccatgagatgtggcagcatttacttggggggagaagaaggaatccaggaatggaagaaacctccttctttgtctcttcccacctgccctcataattagtgtggccaggtactggcacacatgctccagtttcagccactgactctggaggttcagttggaagatctagtccagaatccgatggatctgataagcttggtcttgacttggccaacttagactggagtttccaaaagaaggtgttgcatcttgaagtacctttcttctgtctcatgaacacaatatcagccacattcaagagttaatcttgttggtctccatgtggattccagtcttaactgttaaaaaaatcttctgtgttaccaagtttccaaatattttctctttagctatctgaaatgatacagaatagactgattgggactgatgacagcaaattcagatgacggttgcattatagaatgagctctattttagccaagttgatagcaaagcaaatcctagttctccattaacttctattattaagccagagatgtgttttcatgaggatttaatgactttcttgtgtgaacacaaagaacaatacaataaatgtgtaacaatataataaatgtggggcactgacaaatgctccacagactacctcagagttctcagggcctgtggacactaacttctaaagtcttaggttgcacttatggcctctttgctgggttttttttttcccatgaaaggagagcaagacatactctgtccaccacagacatggatcagtcgtttcctgggcttcaccagaatgtctcttctggttttcattagtgaagcgtgttcaccattgaagaccagaaggggcatttagggaaggacaatggcagcactcattacccgggtgaatccgtgatttctggactgtgggcctcttttctcacagggacccttgtcaatgctcagctgagaaaagtcttcacagcacagcttacaacaaatctattagaagtgcagaaatctcctaaaagtgctgtcattaagtcacatcacagtctttttctctctagtgattcaacacatactttttgagtgactattatgttcatatattaggtgctagggataaaattgagaacaatgaagacatctactctcagggaatttatattcaggagacaaagaaaaaaattgaatacatatgtacaagataatggcaggtaataagtgcattaaagaaaaacaagaaagtgcattgaagaaatgcaagaatgacaggaattgttaccattttaaatgcagtggtcagagaagtctcttctgaggaggtgacatttgagtagggaccacaaagcaagccatgagaatatatgagaaggtgtttttgggcagagaaaacagcaaggccaaaggcctgaggcgggagactgcagggtatacttgggtaggaaggcattgtggatggaatggagtgagcaagtggtacagtgggagacaacaaagccagagatgacatctttttccttttctttgccatttaactaaattccgaacattggcatatattctttttctttccctggaaactctttgattccacactggcagcttccaaagatgtactcacttctgggcatgtatagggtctcatagagctgaattgcaataccacctctcaccagcagttgccactagggcacccaattcctacagttttgtaattctatttcaaatctgcaacacattgagtgcatgccaggggtcaagtactgcgcaggctgctgggttacaacaataagttagatacagtctggtaggcataaattcaaggcttcagtgaaatgacccatgtggagactgacttctggctttgacgaaacagaataggccgatgctcattctactttggttctgttgctggggacaatgaaggctctatccctctgtcttcctcccgcatcagcctgaacttcaggtcacctcctaacccaagacctttctgaaacctcagctacatgacatcattttctggtgtcatctgaaagaaggagagtctccagtctggaaaagctcccttgggatttttctgacaggtggtggaaaagaacaattccaattcctctcacctttagattgtaccctccaaaccctgcaattaggtctctgtcttgctggattttctccacaaccctgagacttgggtattattatctacattttacagttgagaaagctaaaggtcaaaagggcaaggggatgttcccaagtttttgttggttactaagctactgcctctcaccttcagacttgcctttccacactcagctctgcaacttgcagctgagagtgggaacagcatttttacttagccagcgggtttcctattgggttttgtcattagggggcactagagggatgctggaggcaggagaagggagaagagctgtggagcttcctgttttgcttgttgcccctgtaagtggtctggcctgagatcccagtctcttgggaccttacagtttctatgatgtggtcaccgtttggtccagctgcccagacttgctaaacatcccttgggctggtcctccaggccctgagataccctccaaaggattaggggtgccctcttctcccacagcagcttggaaagtaccataaattcacttgttctcttaatttgtgaaacctcctggacttgtctatgaagagctcctcagaaacaccctcttcattacaatgttaaattaaaatttagtagacgaggcacatagcagaataaactttcaattaaaatatacacactgcgatggtgaagggagactggagagaacttgccggcatctttgccgtgaatgtgctcgagatttaattttactatgacatctccttggaattacacagctaattgatcacattgtgtctgtctgttattgaaactttcaataaaactgagattaatggaaggtgtaatcctcccgggcagaacaaatattcccattgctcatgtcaggtacagaaatggaaatgctctgctaacagctttttgcattcaatctgcgcacatgaagttaatcatgaaaaatgcagtgattctttaatggcttgaatgaaattttttctgcctgccccatttctcacccaaaatagctgcccttgtcagagactcgagtgaagtggctgagaggcagagccaggttccaggggctggggctcaggacgggctggtgatatggctggtgcctatatctgaggacagggtccaccacccttgagaatcagtgtgcctgtcagatggcatagaaccgggaaggaacgaaacccagctactacaggggccaagggcaccccccatcaaattgtaattttggcaagagtttctgtggtaagccatggggaaaagggcttgtctctgagactcccatgtggggagtaacaggtgctgaatctagaagccaccaaaaaagagaaacctcctagttctagctcaggtgggaggcagggtagtatagcagttaagagcatcccagctctactattaaccagtgaccttggacaagttacttaaatttgccttgcttgtttcccctcctgtagattaaaatgatgtcttaaagtgttgtgatttatgttgctgacatatgcaaaacacccagaatggggcccagcccatgccgtgcaagcgttggctattatcattactatgctctcagctgaagctttgtcttctccaccagcatctcctgttcaacggtatttaaggacaggctttggagtcagttcctagggccttgattactagatcttcccggattcctatatctccaagctgcagttttctttactgtaacttagagatgctattacttgcctcctagggttgttgtaaagatgaaatatgtgtagagtcctcagcatgcagaaaacacttaataagtagctattacaatcccgaccattgtttccatccaggccctgcagaaccgatccaactcccagtatgagcatgggaaaaccctgcctcaggtttagttgtgattgatcttccagtagcttctatccatttgagttccttgaactaggtctggataactgggccacgctgaagtcagttccctctaacccatgacagcccttctgattcttgaaattggtcctcctgtttccccaaatcttccctttcacaggaggagcactcgtagctccaacgaatgtccttccaacacagtggattctggttgttcatttacctgaggctacccttctttgatcaagcctggttgaccacatatgtccctttgagagtgtgggggactcagtacctcggatgagtctgtagcagtgtaaaggagagtgatgtggccatcacccatattctggaccccatgcttctattgatgtggtccaggtagcatttatttcttggtaaccatatcacactactaatttcatgaaattagagttcactattattttctaaattattttctatgcctgttgatgcagaatcatgttctttgcatcccgtgccaacacagccagatttctgcactcaaggataggtctttactttgctcttcatagacttcctttttttttttttttttttttttttttgagactgggtcttgctctgtcgcccaagctggagtgcagtgttgccatctcagctcactgcaacctctgtctcccgggttcaagtgcatcagcctcccaaatatctgagactacaggcgcccaccaccatgcccagctaatttttgtatttttagtagagatggagtttcactatgttggccaggttggtcttgaacttctgacttcaggttatccacctgccttggcctcccaaagtgctgagattataggcgtgagccactgtgcctggccaacttccttacattctcacctggtgttattacttgggctctgggttctgacatctgtcatgtgaacttcatgtttttcaaattttcaacaagcaagacattaaacctctttctatacagatgagaaaaacaagacctacatttgaaggcgggtgcttgcttaggggtacacagcaaggtggccagagaatcagggtagaaaacccagtttttctgaatgtaagttcaggaatcagggaagttcagagtcaggtggggagggaggaactgtagagggcacccaaatagctctcccaagtcctcaagcgtgggagcacatcctctgccatatttctttttcttttctttttttttttttttgagacagtcttgctctgtcacccaggctgtcacccagttatagctcactgtaaccacaaactgctaggctcgagtgatccacccacctcagcctcccgagtagctgggattataggtgtgcatcaccatacctggctaattttaaaattttgtgcagagatggggcctcgctataacgcccaggctggtctcgaattcctaggctcaaacaatcctcctgccttggcctcccaaagtgctgggattacaggtgtgagccaccatgcctgactgctctgccatgtttctgacgggaggctggctgtccactccctttgggaatgagcccaatgagggaggggaagcgcattgtcccttgtcctgcacctccccattccaaaagagaacgtctttaattgttaaaatgttattccttaaattgggctgaaatgagctttgtatgagctctgtgggaaattagggtgtttccaaaagtttcagtggttctgttattgtaagcgatagagacccacttaagctaactcaagcacagggttttccatgagggtttaagaggaatccctgttccttcccacgcttgctcccactctctcagcgggtctgctctgtgcttctgtcctgttctctttcttgcagacttattccaccttgtgctcactcctgtctcctgtactcctctattcagccccagcacgacggttccttccagctgcagcctccaccactgcgtggcaacgttcctctgggtctcttagttcacattcttgcgatgaaatctaattagcaagtgtcttagcccaggttctctagaaaacagaactggagaaaaagcttacatgttattgggaagtgtagtttcagggaggcaggggtgagagaaagggggagtgaggcggaaacaggggagagcaaatgcaggagagtgtgtcgctaagctggctgcagctgcctaacagctgatttctcggcgttgcaggacatcttcagagaggccacgtgaaactgcagcatctctggtctgtccaggctaatgattctcagtcaggggtgattttgctcctcagggaacactgaacaacatctagagacattttttgatggccatgtccaggaggatgacaatggcatttggtgatattgtgggcagaggccagagatgctactaaacatcctccaaggcacagcatctcctgctctgaacaaagaatcatctggttcacgatgtcagcagtgctgagactgagaagcactgatctaggctggactcttaggggaggaagggtaagaatttatctgtgggctcccatatccttttggttagaatttgcttcaagggatgctaattcctcacatttctgggttgtttgtaatgtgagcttcaattgggtcccctggtgtctcttgtctctgcagcaacaaggacgtcctgaggtgggaggcaagaggcttggagcaggcatggggtgaggtggcgatgagggttttgagcaagtcccccaggctgctgcaggggtagagtccacagcaacctgactctgactgtgacttgactgtaagaccacaggaatgggacaagccacggctccagccattccagatagaaatcaaatgtgcagatctggggtagctcatacactgagtgctatatagcctcatctttttgagccaaggtctccaaggcatggttttctggccctcctagggactgtcttctattgcgccgggtgcccaccacaggccagttagccagggctacatgtgggctaaggtggggagggtcgtcgggtagaaaacatagctgcttattcagcagaaactctgagtagaaaaaatctaattagagtgagaatgagtgggactggcagtgattaacatctcagacacaccgcacttggaaaatctacctgaagtcctttgtggaatgaggtgggtatgagcagttgtgtgctagtaaatgttaacaactggctcttttggaggtaggtcaggagatgcctggctttgtatgttcatcactttttgtggtataaatgctcctattgtggccaatttcaagctaccaatggtttaacaaccagcttggaacttttctgaaaattcaacaattggctcttgagagccaatataagctggctgtatagtaagcctggtataagtaaataagttaattacaaatgaacagcttagcatgatggaaaaatagttgtgaaatatcgcagacctttctctcctccagcatggccttctctccaattttaagcagtctgatcattctgtactgattccttcagagaaaaggggtatgtcagaaaggaaagggttgtgaattcttttcctgaattttatgttctaaaataacagtattagacagaacaaaaagctcctttgaacagtcagacaaaaatatttaagaccgggagactgagaagagtaaccaccatctggtctctggaagagcaaagattccaaacgctaagggaagaaaagaacacaggagtggaggagaagctgagagtatagttccctgtgtgtcccggggggagcaatctggtccctacctcctgggcagagccctggggaggcagcatgaccccaagagaagtttgtgggatctgggaacagagaggacctgtgccccactctctgagggggaccccagggaagcttagagaaagaagttatcgacaaggtgggaccatatggtctatctgtaaaaatcctgttccctgttgcggtgcaggagcagctgaatgattgctgggttttcagacaagccgcagaaatacaggccggagcttgcagacctgaaagagccagatgagagacctgcgaggggcagagaggatgatgggcatctcagaagatgctcgtgcggatggacgacattgaacacccaattgacttcgagctatataggaatgtggccacaaccccagggaaaggagggggtcccctgagattggtttatgcaccgtagcagaagcttgaaataaagttacaaagaatttttttgttcacagtgaaatttgtggaccatgattgaaattcaagccctttgctttagactagggatcagtaaagtttttctgtaaaggatcagagtaaatattttaggctttgagggtcatatatgaccttcttcctctttttttccccctctccttcctccttctcctccaccttcttccttttgttgcaaccatttaaaaatgtaaaaaccattcttagctggaaaaagtcccctcaaagtttgtcctcctcccgctgctcccagtccacagagctgctgtctgaatgaggttttccaccggcaacactactagattttagaaagccaggaagattctcctgcaacgagattcagttagtacaaaatgtattcgctgaccaggaggatgacactcttctctggccacaggccacatgatgaagcctgcatctggctgtggaaggaatcttcagcatggccgaagtctgctgtttcttccatctttgatcaaaacgggggcacatttccctcacccccaggggaccaaatcctctccccaggcgcacttgctccactcaatgccttctctctccccgtccctgcctttggaagatcatcttccgggacccagcagccctgagaattcacgacagggtgtggctagggctggatgaagggttacttacagtttctcataaatggacttctaggcggctggtttcagaagccctcagtgggaaaaaccagtcggcccagtgattttttattcattttccttagtttctgatttaattttgaaagacaacccatggacccagatggagagatagaccacacagtggaggagctgtctgggttgccgcgtcattgtcatggtgatgtgagccaccgctgtctccagcacaccctcagagcactccctgggagaaggtgccagagcaggatataaaaccgacttctgagagggaggcggggctggccaggctgctctgtagtgcggactcagaggcaggtccagtgacaggcgggtctgttctgcacatgaacaactgaggagctgagaacatctgacctggactgggcctcctgagtctgtggtaagattctggggctgaggatgcccagattgctgcttctgaggactgggcagctgcatcatgctgcaggctgagccctgaccctggcctcaatgaggaccttggtcctggctatcttttaaaaaaatttttttaaattaattattattattattattattattattattatttgagagatggagtctcgctctgtcacccaggctggagtgtagcagcgcgatcttggctcactgcaacctccacctcccaggttcaagccattctcctgcctcagcctcctgagttagctgggattacaggcacctgccaccatgcctggctaatttttgtatttttagtagagatgggggtttcatcattgcccagggtagtctcgaactcccgacctcaggtgatccacctgcctcagcctcccaaagtgctgggattacaagcctgagccactgcgcctggcccggtcctgattatcagaggagccccagtctatccagacatccccgagatatcctctgacccctagtgacccctgcaggttaggtcacaaacgtgtgagagctcagatgactgtatggggccaagttatctgctttgaacagaactcagagctgtttccttcattttgagaaaagggacaggttgggagcattgtctttatatgcaaaagacaatgtattggaaggaagctaagaattttcttctcaaattgggaggacggcagtcctggcatcttaattttatttttaggatattttctgcaaaagaggggagcggggagtgagggggaaagcccaattcgtgccctcttcaattttgaaaccattaaacctcaggcaacttgagtgataatcagtcaatccacaagcagcctgtcaactcatcagtgcttatgtacttaacaccagtgggttggagcgcgattccagctcttcaggaggaacatggatggccaagttggggccctgctttgggggagtttcagtgaagttgggcagtgcagtgcaggatgtggacatgcttacaaaagtctgtaaccataggctgggcatttcagggggtgatccaagtgctagactggaatggtcagtgaaggctgcagggcgtgactgctgagctaaccttgcctcaggtggataaacacattggacactggtaagccctatttgtccacagctgctgtggatgctccgggctcgtggactctggagcttgctagcaaaggccttggggacacttacaccgagctgcttgtcctcaccacactctggtgacccagctttctagccctcccaccgcgagctgccttgcaagggttcatgtgcctttgtaaatgcatccttttttggagtgaacccccaacctcagactcctgtgttgatgatatcctccccccaagggatctttctaaaatagatttgaccatgtcgttctactgcttaaaagccttcaatgaatcccagttgggtttagtgtaaatcagatctctttatctttgttcttcctgccaagctgccctccaccccagcatgggcatgcacgcatacacacacacacacacacacacacacacacacacacacacacacactccaaatgctttagcaaattctcttgcatacacacacacacacacacacacacacacacactccaaatgctttagcagacagagtctcttgcatttctccttacctttatgtgttccctccacttggagcaccctggcatatccttcccttggcctgtctggtcaacccctgtccctctgatcagcagtgatggtcttctccaggccacactcctcccacacttacctctcatcatctggcaaacatccactcctctctcaggctccaaatcaaatgccactttctctgtgactctgccacgttgccctaggtctttttttgatgtccctctaaattctggatacaactcccaaatagaaacttttaaacaattaaacattaaattgactgatttttcccattgttaccagaaaagttcacataccctttgacccagcatccccttttgggtactctattctgtaaaagtaaaaatgccagtacttaaggacagtagaacaagaacttttttttcctccaaaaaaagttggcacagtattgccaactttgaagtggcacagtattggaatgtacaaaataagagtgcagttgactaaattatgacacatccatggtatggaatactacgcagctgttaaaaagaatgagttagatttctatgaaaggattgtagcatattgttaagtataacagtttgctaagtaaggtgagtggtataatcatatatttgtaaaaagcaaaacaaaataaagccaaaactcgaacctatctttgtgtgtttgcctatgaacagagaaagggaagtgaggatgcacatcagacttagcattggcaaccttgggggatgagttgtaaaactgataggaaagaatgattctttctttatataactctgtattctttgactgtgccctatttggtgctcattcagcttctcatacctggaggtttacatcttttgccaaatttggcaagttttcagccattttaaaagttatttttcagcctgtcctttttcgcctattcttctgggactctgatgacatgcatgttggttcttttgttatagttccacaggcccctgaagttctgttaatttttttttttttcagtctatctccgttatttagattgggtaatttatattgttctgtattcacgtcctgatgatttcctctatctccttcattctgttattgattccgtccattgagtcttttattttgattactctattttcaattctaaactttccatttggttcttacttatatcttctatatcttttttgagactttctatttctttgctgagactttctatttttttcatttgtttccattgtgtgtgtattttaaaaagctttatttttgagatatagttcatgtatcatacaatttgcccatttaaaagtgtatgagtcaatggttcttagtaggttcaccgagctttgcaactgtcacaacaattttagaatattctcatcacgcaaaaaagaaactcccataaccatcagcagtccctccccaattctcttctccccgtctcacctgtcctcttcgcaactccaggcaatcacttacctaatttctgtctctatgtatctgcctattctatttccagtgtgtttgtaattgttcactgaagtattgttatgatgactgatttgaaatattggtcagctagttccagcatatctgttatatcagtgttgccatctgtatttgtttcctaaggctgttgttgcaaagtatcacaaactgggtagctaaacacgacaggaattctctcatggttctggaggctagaagtctgagatcagggtattggcaaggttgggtccttctgagggctctgagggagcctctgttctaggcgtctctgctagcttctggtgacagctggcaacccttggcattccttggtttgtacatgcaccgttccaacctctgcctttgtctccacacgacattctgtgtatctgcctgtctctgtgtctgtttttataaagaaaatgtcatattggattaaggacccacgctactccactatgacctcatcttgactaattacttcttcaaaggctttatttctaaataaggtcacattctgtggtactggaggttaggacttcaacagattttttgggaggaacacaattcaatccataatgctgattatcgttttgggtttttttttttttcattcagtttgagaccttcctatttcttaatagatcgagcaattttgattgaagcttggactatttgagtgttatgttatgagactgtcttggtttgttccatgctgctataatagaatactacagaatgggtaatttataacgaatagaaatttattttctcacatttcaggctgagaagtccaagattgaggggctggcatctgctgagggccttcttgctgtgtcattccatggtggaaggcagaaggcagagagagagagagggagagagactcctctttttaaaaggaacttactcctgtaatgatggcattaatccattcactctaccctcatggcctaaccacatctcatgagcccccacctcccatcattgttgaactggggattaagttcccaacacatgcttttgggaggacatactgaaaccatagctgagactccagatcttatctaaatctttgattttatctggatctctccaataccattccagcagtggagggagaccctgccttgttactgctaggtgggggttgaatttcaggtttcatacttggcttccattgacaccagagttggtagaactctttattacttgggggatagggtaggatttctggtttcccactaggactccactgatatctccctggctctgtgggtgtgtgtcggggggtgggaggaggtagaagtgcctctttagtgatcaccaggtagcttccagtgacaccacgggggtgtttgtcctcgttacttttgagtggtggtgaaagtcctgatcttcccctcagcctcctctgactccagcttcttggggaggaagtctaggcttaccatttggcctttgctgatgtacatgggtggagggcacagtatttttatgtggtgttttgctggagtaaagcacttgttatctttcttggtaggttgcctctttcctggtcctttggcttgagacagtaggctttgttcaggcttttatttatttatttagtcttcaccattggtgtttacgtggctggcttcttcagctctaagtctgggacacatgaggcagaactgtagctcaggaaactcaccatcatgttgttccttgggtctgaaactcccaagtcagttaaccttcttctctccacctttcagagtcttcttatatctatttatgcctgtatgctcagggattttcgttgtgcctcacaggaggaataggcaaaagcatgtctaccctcattgtcctagaagcagtccatcagtagaattttttgtaacctacgattatagtaaattatgttaatatttttgctggtgttggataacccttgtattgttagaataaatcctagttgtacatgctgaaggtttcttttaatgcactgctaaatttaatgtgctaatatcttatttagaattgctgcatctgtattcataagtgaactggtttataaattcttggtgtgtgtgtgcctgcaggtatgcatgctgtgtttgcatgctgtcattttcaggattttgcttatctcctagaataatttgagactctttccatgtttccctgtcctgtggaacagtttaaattacactgggtacattcagtccttgaatgtttaatagacattccccataaagcctttgactgtgccactatttttttgtggtgttttttgggcaattcgatcagtttcttcggtgcttccccaatcttctcagactcttgcttcatgccaagtcaagttcgaaatttttcttttcattttttttcttttttttttttttgtgagcatggcccaacgatgaccagctggtacaagtgcactggctggttcttcttctctcttttttttaattatactttaagttttagggtatcgcaagcacgaaatttttattttccaggaaaatcattatttcaaatttattggcaatattgtatctagtattctctggtaaacttaaatctcctttataatctctattcacttttaaaaaatatgaggtatttgtgtttcctttcttttatcctttacatgccaatttttggtacattttaccagaatttccagataaccaggtttttagtttgttgagcttcatagatattgtgtttctttttaattcattctttcttgctttcaactacaaagattaaatatttcatctaccttaaaaaatctcatggtttgtcatctaacttattgaattgaaagcttggttgatttgttttcattctttttgtttgagaataaaagtattttgggtgatcactttttctttgagctgggctttggtcttcatcccctgggattttatatatagtgatctttgtgtctttaatttttaagtgacctgtaattttagttacctttgaacagtgcttttcaaatttttttgtggttagttttctgatattattcttttgttaaatgtttctagttttattcttttctagccagagaagattccttgttaatgtcctacattttttggcatgtactgaaattttctttatgcatttatcctggtcagtctttgtaaacattcaatgctttcattataagttatgaagtcctctacatatctactgaatcatatttgttaattataattataactgagttctctctctctttggggggcagaggtatgttaatgtcaataggctagtaattttatctcttcatttttctgaaaagctttttttccctatgttttgattctttactgttcagtgataaatatctttttatcaatggtattcctccttgttttacaaggcagttataagctattcttatatttattcttcttctgtcattttattgtggtttggcagaaaggggaggtatgtacaggagaggacaggagaggggagaagagaggagcacatacttccccttccttccaaattattttacaaactcagtgctgcagttcaataatgagctatttttccaaaaaagttcagagaggttttctgtctgtgatcacatatcagaagagtttttggggccctttgtggggaaaagtagaaaatctgtgtcacaaaatatgtcatgactataagagactaaaaagatgctccctgaggtattgctgagttgcagatttctttttttttttttttctttttgagatggagtcttgctctgtcatgaggctggagtgcagtggcatgatctcggctcactgcaacctccgccttctgggttcaagcaattcttctgcctcagcctcccgagtagctgagactacaggtgtgtaccaccatgaccagctaatttttgtatttttagcagagacaggctttcatcatgttggccaggatggtctctatctcttacccttgtgatccaccagatgttttttacatccgctccttggatgtggggaggaggcactggctgcccgcaggttgctgagcaggtgggactatgtatagccaggttagacagcaactctgtttgagaaccttggcaaggtcaaagccaaagctgtctcagagagctggtcatgggactgattctaactctttatgaggacagccagggactgccctcataaatactgaaatagatgtaaacagcatggctgttgaggcacaagtagcccaggagtccttttaaatgatatttcttttatatttcaagcagaacatttactcctacttcagacagttgcattataatcaaattgaatcagcctgttttatactttatatttaaggctgataagtttcatctaatttagaggtctggcgagcaaaaggaaaagacctggtcacaaagtggtgagtttagggcacctggatcccagcaaacaacatttcctggggacttctatcagtacatgggttcacactttggttctaccactttctacctatgtgaccttaagcaacttcaccttcataagcttattttctcttctataaaataaaggtaataataatgtctacttcagaggctttttgtgaagattaagtgcaataatgcttgtaaagcgttgaacacaatgcttgacacatagtaagcactcaataaatattagctattactgttattatcttgcacagtgatgaataatgttgctgcagtcctgtggtggcagctgagagccagaatgggtgcagaaagccgctagtatttggaattccttcagcagcctggtttgttgatgcagtgttaaattaaagcctattaattcattgtgaaaacaagccttcaaaagggcctggaatttgcagcttcttctcctgaattcatgctgcatggcaccactttattttaagagtaataaatgctagctcaacagtggagaaaactcctgctgctgggtttgctgggtggccttgctgggtggttgctgttgccacctgctccctggctggaagctgccaagcactttcctggcagtgacttggcccaaggccgcagcccccagcactcactgtggatgtgaagtggccacaaaaactggtggtgagcaggtggtggagacaagacaggtgcctgattagatgggttctaggccatcttgaagcagaagttataaaaagaaaaacaaattttcctgtactaggctgactcactccaaggcccagagatgggcagggctctgtcagggctctgatagcactatctgcagagccagggcccagaagggatgggctccagagcctctccctcctgtcctggagcagggatgagaaaaacaagttttttctctttcagcttccccgtttccccttactattctcataattatttttgcaagttttataagttcatgtgtttcccttctgtgcaagttcacaaggtatgtttgagttgcaaaacttgtcactgtttgacccactgcctttgttctgcttctgtaagcttgcttgcctgccctacgggttttctgccatcaaactggccagtccccttttggatgcatatataaaagtcaagccctgtctttgttcagggctcagcctttggatgctaatccactgggctggtgcacacctaataaatcctcctgtctcacccattggtctctcttgtcccttgattcctgcaacaatctctgggaacattcattgcagcctcaggaatatgcatagtgggtgatggaggagggggctaggagagcccccagcaaggggcatgagctgcccttgatttgctggagtccaaggcctgtctagggaaggagttgggggtgactgaggggcagctgatgtgcaccaggatctcattagtcctgtgctttacatcgattcacagggctcagtggcagggacatgccaaaacgcacccaaactcaatacacagggaatgtgactctgatctatttcttcacttaagggagtcatttcacaaacagcaagggatgccagaagacctcagagttcaagaaaactgcctattgtgtttcctaaaaataagaaatcactttgagccctgcactgttataggtaaaggcaatttcagaaagcctttagttccattgcccaagttaaaaaagggataatttgttttagtttttatccaatttatacatataccaaatttgaagaccctgataggtctatgaggcttgttattggaaaccgtcctccctctttctcatccctggaggcaagaactttcaagattttagcccattcttgtggtattgatctctttgctttatataataatcttgcagctatttctatattgtgtagtgttgggcactatctcctggtttcctactgtgaataagatggatttagctcttttttcttctcactgctcttcccccattctctttcctcccaaaacatggtgaagattttggtgagatcaccaccaggtttatgttacaatccctatgtaagtgcttttatagcaggaacgtgcagtgtcctatgattactttttctttctttttttttccccttgggacagggtctcactctgtcacccaggctgggtgcaatggcatgatctcagctcactgcaacctccacttctccagttcaagtgattctcctgcctcagcctcctaagtagctgggattacaggcatgcaccaccatgcccagttaatttttgtatttttagtggaaacggggttttaccgtattggccaggctggtctcaaactcctgacctcaaatgatccactcacctcagcctcccaaagtgttgggattgcaggcatgagccactgcacctggccacgattacttttctgcatactatgatggcccagcctttcatcttccatgcaattcataactgtcctgggtctttcatttctctcgttttctgtggattttccaataatccaatgccaagctctctgccaattgtctagatttccccagaaggtgttcagacagatatactatatgtttcattttcctgaagaaacccctaaccagcctgtcagaggtgggtgttctcccagcctgctgcttagttgacatctgggaccttccatcacatcattgtggagattctctttgcctgtctcctgggttggatctcctgtgtactctgtcccctgtatctctttctctgtttaccctgcttattggggaccaacccatctctgctgttttcatgagaaacagtgcctggaagatagacttttgacatcttgcatgtctgacaatatcttcatttgacctttacacataattggtagctttgctgggtaaagacttataggttggtaattattttcctttcaatgtggatccttcagttttgggatttttagtcaattgttcctttcatcattttctcaggtcccctttctgaaattccttttgtttaaatattataccttctggacatgtctgctaacatatttttctcctttccacctttttgtcttttgggagatatctcttcactctatcgtctatcctaatgagtttttcatttctgcataattttagaagctatttgataattttagaagttttttgatgtttatgttatttcattctttttttttaatcggtgccattttctgtttttttgagatagaatctcactttgtcaccaggttggagtgcagtggcatgatctcggctcactgcaacctctgcttcctgggttcaagtggttctcctgcctcagcctcccgagtagctggactacaggcgtgagccaccatgcctggctaattttttatatttttagtagagatggggtttcaccatgttggccaggatggtcttgatctcttgacctcataatctgcctgcttcagcctcccaaaaggctggaattacaagcgtgagccactgcgcctggcctcattatttttttacagcaatctttcctctctgcaaaccaaaaataaaattctaagacccccacagccatctaaagggacccctcctcttggccaagggcattccaaagttaagctgaaaaacaagttcaggccatgatgggaagagggagctggacatgcctcattatcccctctgcccttttggaattatggatagaacagactctgtacatctgagaagaaacatttacagtctattctctctgtatcctgctacctggagtctttgtctgcatgataaag[135 bp omitted]agctccacctcctgggttcatgccattctcctgcctcagcctcctgagtagctgggactacaggtgcccgccaccactcctggctagttttttttattttgagtagagatggggtttcaccatgttagccaggatggtctcaatctcctgacctcatgatccgcctgcctgagcctctcaaagtgctgggattacaggcatgagcctccgcacccagccattcctctctattgagaataactcttttgaccaattgccagtcagaaagtctttgaatccatctatgacttggaagccccaccctggttgtcccacatttccagatggatccaatgtacatattatatgtagtgattaatgtctcatgtctccctaaatgaataaaacgaagccgttccctgcccaccttgggcacacgtcctcaggatctcctgaggctgtgtccttaacctttgcaaaataagcttcctaaattgattgagacctgtctcagatacttttggtttacactactgtgatggatagttttctctctctttaagtttcccttttcctgcaaggtctctgcctcctccaagctgctctttttcccatgcttatttaagtttctgtctttcacattaaagttctcctcaactgtctggggagccttagttccagctcatatttgaaagctaactggaagctgcgcttatggatacagcttgtcaattgtgagcttcacgtagctggtctctgggcatctcaatgttggtatctctaggtttttcctttggagattgtcagatgacctggagatcatttccatgtcctgcctagcaatctgggagctgagggcgagaagaagtctgggaggtggggttccgcactgagtctgcaaacctttactaattctccctgctctctgctgtatctggggtgcttcagtgcctctattttttttcctttccctagagaatagaccttccagagactaaagcttcagttctctgcaggggtgaggaaaaagggacttgcgatcttcttacacagactctcaactaatggctttgtttctgtcacatgttaatctacatttccagcagactatggtagtgggggcaggtggtctgagatgtaatccaggttgcctgttggcttttcttactcttgattgagaagcagatttcttagttacagcccttccaactgctcctccagctgctttcctgcttccaaaattttgttgtagttatatcctttcacttaccttttaaaacctaatgggcttatgacttaaaagaaatccttttattgttattttagtgaggcttgagatagagcagtgctaaatgcatgtgtttaacctgcgccaactttaactttttaaaattacaaataatacatgtttactgtagcaaaattagaaaatataattaagaaaataacacataatcccagcactttgagaagctgaagcgggtggatcacctgaggtcaggagtttgagaccagcctggccaatgtggtaaaaccctgtctctactaaaaatacaaaaattagccaggtgtggtggtgtgcacctgtagtcccagatacttgggaggctgaggcaggagaatcacttgaactcgggaggcggaggttgcagtgagccaagatcatgccattgcactccagcttgggtgacagagggagactctgtctcaaaaaaaaaaaaaagaaagaaagaaagaaagaaaataaatgtaaccacagtaataatgctcttacttaggaaaaatgattgttaatattacagaggtaggtccttccattacttcatatatattaattctttctcactatattatatatgtatgcaatgattggaaatcaataaacacactatttttaatcttaatgtgaacacctttccaagtctctaaacatatttctaaaatgattttaatggggctgggcatggtggctcatgcccgtaatcacagcactttggaaggctgaggcaggtggatcacctgaggtcgggagtttgagaccagcctggccaacatggagaaaccccgtctgtactaaaaatacaaaattagccgggcgtgatggtgcatgcctgtaatcccagctactcaggaggctgaggcaggagaattgcttgaacccgggaggtggaggttgcggtgagccgagattgcgccactgcactttagcctgggcaacaagagcgaaactccgtctcaaaaaaaaaaaattattgtaatggttcatattatttcttgaaatattttacagtgtagtgtatttttgtccagccctaagtcattggctatttgggttttgtccactgatttttcaggatcatgatagaaactctaatggacaaccctctaacagcaccccagaattcagaattcctgacggcgggttccaggcatctgtatatttttaaagctcccaaagttttctgtgattcttgattatttcctcaggatcaattcctagaattgctacaccaaaagtatacttagaattcttttaattcttattacccagttgtccctcagaaagataacgtgcatttcaccatcaatttgtcagaacctggcttctttacctttgctgatacaggtattagattttaaaatgcctcccagccgagaggcccaaatggtgcattgccagtgttttgatttgtgtttcttggattactgctgaggctgagcatctcttcctattcattggccgtgtatatttcttcatttctgaatggacctcacagtggatttaagatttatagttacactcagatgtgcagcagaaatgtaactttcttcattttttttttataaccaagcttagcttggtcctgaatttctaccatttccactcagcagaaacaagccaattttttattcaaagtaacttcttgctcagtcacttccaggtgacacggtctcacctcctgcacccactcccattcctttggtctcgatactactctttggcaccttggtccttgggggcagcctctgcaccggctgtgtctgctgctgctgctgctgctgctagtagtgttccctgctgtccagaccccaccctggctggaataggagctgcagaggcctgggaggttggactgcaataacagtctttagagtccagcccggccgggtctctgaaccacacaggaggtgagaacaactcaggaagagggttcctccacacccccttctcagctaccacttgtactctcttgatatcacccctcattcctctcagtggctgccagggttctgggtgggaagcagacaaaagacactctgctcccagccttttctgggggccaaggaaaaatctatggccaccttgcttgatctttcaaatttctctcttcctttttttttgagatggagtctcactctgttgcccaggctggagtagtggcgtgatctcggctcactgcaaactctgcctcctgggttcaagtgatcctcctttctcagcctcctgagtagctgggactacaggtgcacgccaccacgtccagctaatttttgtatttttaggagagatggggtttca[141 bp omitted]gagtggaaaaactgctctcgcctcctgtttagcatcctctcaactctgtgatcttggctttagaggctttggctttgttttgtttttttgttttgatggcatttgcaaagaaaactctttctcttgcaaataaaaaatactttgactattgttacagggaggtctttaaaagctccattttgaaagtaaaatatgagcaatacacttattcctgggtttgcactgtggggtgctcattagaatcacttggagagcttttaaaaaccctgatgctcaggcagcaccccagaattcagaattcctgacagtgggttccaggcatccatatatttttaaggctcccgaagggattcaaatgggtaaccagggtagagaagtacttgttccaagctgcaactgccctacccatttctggggcaatggacctaagtaacctcatggctcttgaaggcagggctccaaagcacccggggaacaaactgggctgtgccactgagggctgggaatgctggcgcatgggcttcgcacctgcatctcagggccttggaggcagaaggggctctcagctgggtgtggattcatctccagccggcttgacaggcctgagatggaggctcacagatggaaccctgctagggggagaggggaggaggactctgcccctaggtcctcattaggcagtgtaggcgggaaaggacttcctctgttgctggagtttgtcaaagatcaatatgctgcaacatatgttttacagcttcctgtggtctctgataaatctctggagactcctttatttgtcttttttccccctcaaggttatgaagccaactgttttcctcagtgtacagatgcgcggaggcagggagctcattttccgtgagaaactggcttctgaggatggaggctttgggggaagctggcactcggcctacaggacagagtggttggggtgtggcagacggtgggcagcgtctctcctcggtcatgcacagaacacaggacagacccctttgcaaagactgatagaagcgactttgctgtttccttcacagcagcgtggtttttagctttctacgcgcaaggcattttgatggaggaattaggcacgtttcctgccctccagacacttgcaggtagcaggggagataactagctaccattatttccagcaccagctgcatgtcaggcacaggtgatggagatgataatagtattaataaagcctcccacttatttagctgctaatatgagcttggccttttaaagcactctctgtgttcctcacaggaactggatgtaagatgtcttgctactggaagtgtggccctggaccagtagctgcagctttgcctgagaccttcttagaaagacaatcaggctcatcccaggcccctgaatctgaatgcctagccaaacaagatccccaggtggtcctgtatggcttgtcatccccattttacagacaagaaaacagaggctcagtgggaattgagcaacttgctcaaggccacagggcacctagaagttaagtggagatttgaacccacattctggttccaagacctgctggtttcccactctgcaatgctgcctcacgggactcagcagatgttggtaaaggctagactgcagtgctattggagaactgaggactggaggaggaacagtccccagatttcagatttcagatggggaaacagccaggagggcttcctggaggaggaggtgtttgaatcagtcctacaagagtgggcaggacctgaagagaaggggcaggcttatttgaggtggaggaagcagcctgagcaaagacagggaagagtgagtatcgttcattcagaaccttctcttggtggctgcagactcctatggccagacacaatacaggatttgagataggatggtggcgattcaggaaagctttgatttcccatttgtctgtgactgccagaggaagcagccacacagcctctgccctggctgcagggtgcttagaaatggacctgcctagagggaggtctggacccttggcccctgcttctttgggtctgcggaaccctttcctcccatgatcccctgctgtgccatgccttgccttccccaacctgccccatcatcccttcactgctgaactcagagaaaggctcacatagcccttgacccctggacacagaaacccccatctctaggcaataaccagtggtccaattggaggtcatcatgggaccttgtccctgttccctgttctgattttggcagtcagccatcttctcaaaatatagataccaactgtggtggtgcctgtcaaagacaaaaccaaacacatagggaaatggattttatttatgtaatatggagcgcacccgagatccgaagatgagagtgtgtcttcagggtggtttatagacgtttagagggaggaatagccaagttataggtagggtgatattacagttaggattgtttttgtattcagagagtcttcatcaatcagctgaacagaaaatgtttctctctgtctagctggcttcaggaggacaaacaattcagccaaccatttatgagaaaaagaatgggaatttagaaagtccgtgtctggccttgtcccgggttaacaaggtggtcattcgctagtcttatctaagtcatatgggggagggtggttctttgcagtgagctgttttcccaaacacagaagggatgtgggtacttcttaaccatcactgtttttgcaaaacacagggcttagggaaatttcaacatcatcatgtcagaatttctatacacagaggtggaaggagaaccatctgattaggaggtgagggccagagtagtcctttgaagttgtaattccagagaaaggatgttgattttatttggattgtgtgttaataccgatcaataaaaatagcagagttttctaaggatgctcttattaatattttacataagtctacaaaagcatgagtttctcacatctaaaagtatttttacaatcaacatcatatcatgttaatgattgacatgtatgtcaaatggaatggagaatatggagagtggagggtgcagctgaggctccatggctgccctctgagctacgcagtggctgaggtttcctgccaggggaggcaggacgttgcagtgcagggcttctcagatcttcgtttgtggattatggctttggaaccacctgggaggcttgctaaaatgcagaatcctaggcccccatcaggagctgctgaatcagaatctgggcatagagtggagtggggctagggagtctgtacttttaaccagctctctggtccttgatggggtgaagtcagagaagccttccttgtgagtcagatgataaaagtgaggcctgaagaatgagtggagggagagacggagagaaggagcattccagtcccagggaagagaatgtgcaaaggccctgaggtagaaagctgcctggggcacttatagatcagaccaagtgtccttatggctggagagaagctggccaggaagggaaggcgcagtgtaagcctgcagggagagccctgggccaggtccagtggggcccagagagccctcctgagcattctggacttcttcctgagagatgtgggtagtcatcaagggttttagttgagggtgggtgggtgggagaggtgggaatgtgagttgatcactggcccatcacacccaaagtgtccaaaactaaacctccagccctcaacctactctccttctcagtgagggccatcgcccacccagacacctcagaaggaagcctggccatcacctggattctgctgacttgtcccaaacatctctcgaatccatctacttctcccccctcaccccctctcctgccattacctgagattgggcagtaccttctctcacctggacaatgtcagcaacctgggcttccttcccccggctcgctctccccatgcccacccattctccctacgatgtagactggcctttctattaggcagtggtgagagatgagactggagagatactcaaacagctcggtgatccccactgcctctggaaactgtcctcaacaccatgtgctccgtgcccccaccctgctcccctctctatctcttaccactgcctactcgacagccctcctcccactcctacccagcacctcctcacctccaggctgctccactctgcctgacacttagatcactgactccagcacacagtcccagctccaggccgcctcgtctggaggccttccttgaccctcccgggctgggccaggaactcccgctatgcagtctcctcccgcctgcctgctcttcttggggtctctcccagaggaccctggccccttctcaggggaggatctgggtatttcttccactactcctggcatctggcagagcaactgatctaggaagtgctttgtgggtaaatgttagctaagcaagggtaggtttcttggcttcccctggattgcccagtgtggggccctgatggcagcagcaatctggtggcctcggcctggggctgttgctttctggaatattctcctcccagctcctcgcctccctgcctcttcatcttctcccctttggctttaatgcttgtaagaccatccaggataattaagagagaggagttttatgctgtttatgggactttgatcaaagattttaattaacctaccttgctttaagcctttaaaagttcattccccagggctgaccgtttgataatggaattaatgcttctaggcagagtgggggagtgggggaagcaggaatcgggagggctgacaaggagggcctagcgattgtctcattaacccttccccagatggatagatttcggctcaacataaaagatttgtctcagtctgagctattcacctatggaatgatggggttggagtggtggtgagacccccatcgctggaggtatgctagcagatactagacagtctcctaggagggaggttagtcagtcatcgcctcattgatcagacgaggtcacttttagggacctgccagacctacgagtcattctctctctccctatgccatgctggggaggggcagggtacacagtctgactcatacctggagctttgggttgaggtcaaaccagtagttctaataagaagacaaagactaaaggcagcaactccatgaagctaacataccacttgcaaaaaaatcactcttccaaccagccttcatggaagctgcgcagagggaatacttatctgtgcagacaccacctcatgggttcagacctgtgcatctgctttagaagccccgaactagttgtcactggggaggcagtcctgcaggtaggggttcctgagcagacatgcaccagacacccctggaaagagacttcctggagcacaggccctgcctgttctcagatgccagtgccttccggtaacaagcacctcctttagctcaggtgaggatcttggtgagacagtctgctgttttgaacttggggggaaaagggactgcagtcaggaatgtctgtggtaggtggggtgggggatgcaggaaggaattagggttcttagctaagatctattgagttgattattttccagacactgtggcaagtactctatgtgtgttaactcatgtaatctggctggtattatttttcccatctaatagatgaggaaatctaggccctttgaaatacggctccccaggggatggaggatgaaggtcatagagtttctggccctctctggtctggactccagcatgctttcccccagcattccagaaattttccacttacaagaactggctcatgtcttccctaccattcttcaaggtttggctgaaatgttggtgcccagcggcccatgccccacccaactcctcccatcctaagcccctgggagctttcactggattcccaaaatactcactggtacttgtattttgccagttatgtccttctttctggcgttataaatatccgttttaatgcccaatgcccagccctccggccgctagacaaagatgatttcaaggtgggaagaccatgtttaattcatctttgtcttattcctccacccagcataaaccccacatttcacaagtgatgttgaataaaatgaaagaggaaaagctccacttctacatcattaggttctgagctgataagtagaaatattaaggtgtcaatcaacaagcatttcctgagtcctggtcaaacgggcaaggttcccctgtccccgtcgcagggtgtgcattgggggtgtggctcacctcttcagtgcctcactgctgaaattctaggggagcatacagacaggcaggctgtgggggctctgaccccatggtagtgtctaggggtgagtgttcacagctgaagccccagtgggcgtgtgttacagggtgctcttttagtttgccgtctataggcggcttgtgttaaccaactcaattagagcccctgctttatcacaaggacagagagatttctgtatcccacagtttcttgccttggtataccacaagcatcggatcacacgtgggcttggagaatgagtgcaaggttttattgagaggaagtagctctcagcagatgaaggagccagaagggagatggttttcccctggagtcgggccaggtggacgccccactcttctcggactgctccatcccagctccgcattgttttgctggtcaatggccggccagggtgctggtgcctgaccgtgtgttcttccactggtgtgctcctctccatgtcctctcaaggacatccagctgcttgtctcttccacccatgtgctcctctcaacgtctgcctgtctgcccgatagggtcttaggtttttttttttttttttgaggtggagttttgcttttgttgcccaggctggagtgcaatggtgcgatctcggttcacctcaatctccacctcccaggttcaagcaattctcctgcttcagcctggtcaggctggtcttgaactccccacttcaggtgatcttcccgcctcgacctcccaaagtgctgggattacaggcatgagccaccacgtgcccacctgggtctcaggtttttataggcccaggatgggggcgtggtaggccaggatggtcttgggaaatgcaacatttgggcaggaaatgcctgtccttacctaggtctgtgagggtggagccctagccagggaccacgccctcctctacgcagcacttcccttccccacttccgtattatttaaagggaccgtgctcttcccttcccagcacttccctgtcactggaaactatgtatcacctgggggtggggaggagatggggttgcttgtcatcataagcccttctacagcctttgactttttttttttttgagacaaggtctctctctgtcacccaggctggagtgaggtggcatgatcatagctcactgcagcctcaaactcctgggttcaagcaatcttcccacctcagcctcctgtgtggatgggaccacaggcatgcatcaccacacctggctaattttttttttttttttctgggtagacacagggtctcactatatttcccaggctggtctcaaactcctagcctcaagtgatgcttctacctcagcctccaaaagcactgggattacaggcattagttactgtgcccagcctgaatttttaaattatgtatatatataactttgctttaaaatgcatatttaacagtgaaataaatggcattttctttcatgtcttaaaatcaccaaccagagggcaaaaagccaaattccaagtggctaagcgtgacccttataagggaactgtcagtttcccattgggtggcctaggttcagagggaagcccctgtttaccccaattatgtccaatgtctccaatgatacagaggaaaaggagcaatgtttctttttcttttcttttttttttgagatggagtctcactctgtcactcagggtggggtgcagtggtgtggtctcggctcactgcaagctccgcctcccgggttcacaccattctgcctcagcctcccgagtagctgggactacaggcacctgccaccacacctggctaattttttgtatttttagtagagacagggtttcattatgttggccaggctggacttgaactcggagcaatgttactttaggaagccgtttctgcagaggcttgtcatggtcgtaagatgccagatctgacgaggagcccctttcatgcctgtgctgtaggagaggcttgagggccaggcctggggagcatggattctgtcttgaattcctttcctggtcctgctgttggaaaaggctatgcagggagcgggttcttgaggcaggtatcagagatgcaggagaagaggcaagagagaaagcaagcatctctgtctacatccagaaattagatgcaaggcctgaagttttcccatatctctgagaaattcaggtgaggaaaaggcacggtttcccttttacaaagataagatacatttagagtttgattaagcattgagggagaacagctggagttagtggggacagtacttattataatgcctgttttaagaaatagtcacattttgggggaacaataccatggattatctgccatggcctagagcatcacggataagagggcatgctccgggatcagtctgggctctgcctctctttagccttgtggccctagtcaggtttcttcacctctctgggcctcagtttcctcatctgtgaaaagggaacaatgatagtacctacctcagaggttgttgtggggattagttgagctaatacatgtagcttatgtattactgtatgctcatgtattactggcatagtaagtgtcacataaatgtgagttgctattatttatgattgctattactatcacgtaggatctgctgtctgtgatggggagaagccagccaggggtgcacatagtcaaatcctaaggtgccaccgtcactatcaccaaaggaggacatagatgacttctgaggcatatctacattgctcagccttgtgctggcaggtggcagggagggaaccgctgcatctgccacagccccaaatctaaagtgggaaaggggcttgggattgcacatagatgccctgaggctgtaaggaatgccgccttggagagctccttggaaggaaagctttgggggagctgaagcagagggtctcaaatttagagtgcatcagaatcgctgggaaactcattgaatttcagcttcccaggttcatggttattgggcggggctgcagcatctgcctttgaaacaaacatctctaagtgattatgatgcagttttccttagtctgcagttacctgggagacacagcacatgtagcttctgagaaatgagcacctgagctccctcacatgaactgacttccttcttggctgagagaacttcagaggtgctaggtttttaatcagggttcctggcaccgtgactctgaccctcagctgagcccttgccatgaatataagcttagtttttattctgatcacagacagagccacaggcggactggccacagactgctctggtccttgctatatactcatccctaatccttaccacgtactgacctctacccgtgacctcggcataaatcctgactgtggtcaccagtgaagccctcatcataaacatagactagcctttgcctttgacccttccccaggcagagtgccaagcacaagctcagccagctgactctcacatgaggggatgtggatggttctgcggagcctcctcctcccccagggctggagacacagctgacagcccacaccctgcttggtggcctctggtggggttgaggagagggctctgggacacagggactgtgcgtgaaaggtgaccctagctccacacgcaaggctgattaacgtgtgtcatgcttccctcattccccaggcgccttctccagatcatttctcctctgattaattcctcagaacaaagcttgcagcacttatgtggagattgactggaggaccctgaggctgttccccagtcggctcctaggcctttcctgggtgcttgcgctggtgaagtgtctgaggggcagggaggcctgatgcccagagcctggccagaatgcagacagtgttctgcctccaggatgatgggtttgctggttttttggagacagtttcccactggagccaaatcgagtgagtgacattctgacttaggagtcactgacatactgggttgaaatctgtcaggaggtgaaatgggttctcctttacaaagataagataaaagtagagtttatcttactgctaccaacaccaccattgttatctttgctatctgcactatgaaaaattctttacttgagtaatttcatttaacacttaaatcccaggattaaaacaaataatgagtaactcagtatatacgagtatcactactgacaggagatgacacatcgctccattgagttcaggaccagggaagtgaattcctcagtggacttgcagatttcccattactatactctgaaacacatgaaatccatataatttcctttgttttcttggctacaaggaaattccagaatttctcaaattgctgtagctttctgctgttgaaagttctcaatgtaactcttgtctacccatctgtcattatttcttggttcccaattagtaaacaaaaaatacataaaaattatagttttgatggtatttgagtctgcactacaaataaatatgtgtataaatgaactgaaaatgctgaacattattctaaagtcaatgtattgattgtgtgttggttcttctccagtatggtggagtacactgctaatagactcctaatagactgaccctccttcaggtaataaccataaaccctggataaaatatagaaatctgaaaggctctgagtagtgaacaaagacaggcagattgtgtagcgtatttgaaacttggaagaagggactagcgtgaagtgggtttccccttttgatgacttttgatttgaaggaagctacggtcatgacacagcacagagcatcgaatattctgatagaaagcccactctctttctggcctgaagaaccagaggacagagacagaggacagctgctagaaaatgagggaatgaattccagaaaggaaataagcagagaaaagagccccaagttctgtgaataaattctacccaagtctctggctgatccctgagttgtgcatgcatggtgcagacccaaagaagcttgcagctaaggccaaaacacctgaaatgaaattagatctgctgcccacttcagatgagatagagtttgtagtttgaaactcaacaagttcgatgcctgttaaataaaaacattaacactcttcagagtaatatgacagaatccagagtctcaacaatgtaacaatccacaaaattagggtataatccaaaagtatttgacgtatgaaaaaacacaaaaatgggaccaattctcaaaggaaaagacagtcaatagaggtcatgacctagagactgaaattatcacacaaaggagttaaagcaactacaactgtagttgtattacaattatgggaaacgtggttataatggatttaaaaaagggaaatcttaacagaaatatagagcctatagaaaaagaacaaaatacaaattctagaactaaaaaacaattatataaaataaataattcactaggtggacttattagcagaaaggaagtgacggaagagtcagtgagcttgaagacagattaatacaaatgactaaatctgaggaaaaaagaaaaaagatgaaaaaaaaaaagaagagcttcagggacttataggggaaatataaaactctctaacttataaataattggagtcccaaggagaaaaccagataaaaaccatgataggaaataaccacacaaatcttccaaagtttggagatgaggacatacatttacaaattcatgaatcttagcaagcctgaaagagaataaataagaaaatcatgcctagacatgtcagaatttaactgctaaaatcagtgtcaaccagaagggttttggatacgagtgtattcatttattcaatgaatgtttcttgagctgcgtatcagacactgttggtgtgctatgagcacaacctaatgctggaaactttcggagaggaatgggggcaattactggaattggtttaagattatgttttgttcagtaagatcaaatttacatgaagaatacaagcagaataaacctggagttcgggacatgaagacagttcaggaacaccgttcaggagcatctcagaagaagagcatcgaagactttgaggggaagggagtgaggtctgatgggcgaggagactttaaaaactcaggtggagcatttatgggcaaggacaatgaagtatactctgactctgggctgttctgcagtgacttcagtctagacaaaagtctggataaaagaggaggaggggtcattggatagctttgtgacggtcccataggctgcaggaggagttgttttgaggcaagtgctagaaagttacccttgtagtgttggtgtcttggtgaaacagggtcactcatcaattcatcatgaaactgagtgagcaagggggtctctgtttagaattaaggatgggcatattaccatggggagccagaatggaagatcatgagatgaaggctaatcaaccaagaaggaggcaggaggggcgagaagcaggcagaggcagtctttccctctgagaacattctccaaaagaggcctctttgtcacaaaatatttaaagttaatatgtccatgtgacagtagttaagataataaaaaaaatacttggagaaatatgaaagcaagggacatggattcaacacttgactgaaacatcagtggccagatgatgatctgtgtagggagaagagataaatgatggtatctttttcagtattcaccttccgtggggggcagagctcctttctcaggttgcctcttgtattagggttctccaaagaaacagaactgataggatgtgggcgtagatatcgctataggtatagatatagatatatcttagttgacaggattaataggatgtggatacagattagatatggatgttggtaacctacaggtcacatttggcaggcttccaaatcaatctcctggggtaggtctcatgatgattcatggcttacatcctgtccctgagtaaagaatctaaagaacatttttttttttttttttttttttgagatggagtctcgctttgtccgccaggctggagtgcagtggcatgatctcggctcactgcaacctctgcctcccgggttcaagtgattctcctgcctcagactcctgagtagctgggattacaggtgcccgccaccacgcctggctaatttttgtatttttttttagtagagacagtttcatcacattggtcaggctggtctcgaactcctgaccttaggtaatccgcccccctcagcctcccaaagtgccgggattacaggtgtgaaccaccgtgccaggcccctgagtccctcaaatcctatcgtgagttcctcaaactgtcgatacatttattaatacatagcttactgctactgaaaaggacactgatttctttctgaatcatgaaattttactgattgtcttgtgtgcaggacactttagcatgtatattgtaaaccgtagccaaggattgtaacctctgtcttgtaccctccaataaaaaaaatgacaattctgatatgtggagctgccttcctttctcctaaactttcttgtaaaggcattacaacttgaaacagaccttggaacatgcttgaaacagaccttggaacactgactttgttggtgtgtcttcccaggttgctccccacatttggcttccagtaagcctttgtcaagccttccaaagcctcaacaaccttaattttggttgacaaaatggcatagttggcaggatttcagagtgacctccctggaccacctggagcagcttccaacctttgggcaggaactggcaatgaacccattgcatttttgagcttggatgcacctgctaggtctacaaatgagttcctcctgaaatcaattaacttcttgtcttagtaaaagttccggtttattgaatctgatttcctccttggctaggacataggaggactctctcagaatgagagttactgctacaaattcgaggtaaaggtttttgttgagtactacggcaagggagaataggagctctgtgaattgtttcctgggagtttggggtgagaccacctttccttagctttctccttttttgattgcgtgagggcactcttgctccactacatagcttgtctcactgaaaacaaccaagatgggaagtgggtcctctagttgcaccagctggttttatgtgtaatccttatggtccttgtccttgccagtacttaggtaagtggatcaacctaactcgggatggtcataagcagcaacagccaaaatgggaatttgtttgaaatgtctaaaatgatttatttaaacacaaaattggaaaaagctggctttagaaccaaacaaattgaatgggtgacttacttccaatagcacctaaaagctttgtaaccttcacctgctcccccttcttctgcccctctgatctgaactcactcctttctgcttgttcccttggctttatacatctcttaggcagagatttttggaatttcacaatgctcacattttcttctctcaaaagggggaaatatatttaaattcgaaacaaaagaagcaaatgaaacaactgcagaatgagaataaaactgctgagattaaaaaatacagattttttttaaacaatttttttatccctaaactttgttaatgagaaacactctgggattctcaaccgttgaggcaatgccaggttttctaggcctccagctggctacatattatggcccattcttgtgcacatttgtaaattgatgggcaagttacttcaaggaaaattcagaactcaaatagtcgttattccaaaaccctgcaactctaacgttagtatgtagaatcttctaagttctttatttctctatttttttctgctacctactatgaatctgctgagttttctactggttttgagataaaactcactgctactggtattactaattcaaggttgcttggaggttttgtttttcttatagaattcagccagttctagataatggctaaacattaaaaatgtaaccctaaattcatctgaaaccaaaggaaaaaaaaaagaagtgaaagagattcttaaaaatataaaactgccatggaaactgctatttccaaaattttagttcagagtcttcactatattatctattggggcaaacaaagtttattcatgtaaacaggtctcaattttgtcagagatataatttggatccacttgtcttttcactcataaattagccccaatattccccaagttcatgtgacttaagtaaatctttaataaataagatagctttaaagttattggtaaaatagaaatatcttcataagctgtgaaaatgattaacatagaaataagttgaaataatgcctaggtttgtcaaatatctcatttctcataatctgggtaaacttaaaataaataaattaaatgtaaatgggataaagtgcttatacatacaattttcatgtactttgaaatattaaaattgtgttaaataataactacttattaaacgtccgagttatttccaattaagaaaaaattatgttagaaggaaacatgtttctaaaaattatcaaatggttttcatctataaactactgatatgtgacagatgattcaagatttcttgcctcctaggttttcaccaaaatgtaaggttgctaagaataaaaattctaaataatatgtataattctgtatataaagtgtacctaaaaaacaagatgtgtttttaagagaaaaaaacataaaaagggataacatgttttctttactgagaaaaaataattttgtcgaatttggaggttatttaaaagttgattcaaaatgtagatttaggggaaagatataagaagatagaaaggaaccattaagtaagacagagagagagagatgtgaagaaagttgtggacataaatatatatttttattaagtaaggttaaagaaaaaataattttgtgtgagaaaaaatcttgaataataattttttgtcctaaagtaaaatgacttggtatttaagaaaaaggaagtgtaggataaagtaagcatgtcataaatggtctgtatcaggttcatgaaaagagaatttaagaaagaaattttgtgtgtgtttaagttggctataattaaaaggaaattatttataagtctttctaaagattggtcccctatgttggaacaaggttttcttaaagtattgattcgctcttaatgacattgtaagaggttttgatttttaattctgttatctttttctttttgaaacttctgagatttatattttgcaagttcaacttttgctgtgctcggctacatgtaatttgcaggtcatgtatcattgctttctgtttttcctcctcttgaaaagatatatctttttgcttggctggggtgataactctttccaccttttcatccattcctataacttttttctctagttctaattctgatgttgtggcctgctgctgaaatgtttatcttgaagttctagaaaagcaatgttttcctccagtgtaacttgattccattctcttggcttttcttgatgtgtctgaattggtcaatgtaatttggagacttcccatacaaagaaccatgtattcccctgatcaaggtaatggttttcttgtttacattcctctgtgatgcagtgttcactcatcaccctggaaacacttcctgtgtctgcgtctgtttaaatttaaatatccttttcatcaggcttggcttccaggttatctaaattggcttctcataaggagaagcaatcacaccacaggaggttattctttacctttttggtagctgactgaaaaaccaaagattttacattttgtcaagataattcctgtgttgcctttattaggtttcttgattacttaggaaaactgagctgtaaatgggttaagggttttatattcatgtaactttctgtatggcccctgaggtcttttgattgtcacactggttaaataaataactattattttacaaagacaatgacctgtaattttgttttgttccaatgttttgaaacttctgacatatttgacgtattttccaagggtgaaaatcctaaattaagtctttttggattaaatattaggttggtgcaaaagtaattgcagttttaattgcagtttttgatctaatatatgtatttggtgaattatatggaaaacaatgacaataaatgatactaatcttccttcagttacatctatgggtatgttgttgatataaatgttccaaaaagtatgtaaattataaaaacccaatatgttatcagtcataattttgattatgttaattttttctaaaattatatggctatgttattaatatgagtattctaaagattacataaaatttataaaagtctaatggtcctgatatgacactgtcagtcatagttgtggttgttatcttaaaatgctacatgcaatggaaataactaaatttctttgtcaattgggaattttcatcagatttaacctatggctattcaaagtttttgtgatcatagcttttttttttctttaaattgagacagagtctcaccctgtcacccagggtggagtgcagtggtgcagtctcagctctcagcaacctccatctgccaggtttatgcgattctcctgtttcagcctcccgagtagctaggattataggcgtgcaccacctcgcctggctaattttttgtatttttagtaga[144 bp omitted]ctccaaaactgctttccatggaagagactctaacaagtccttttgaatacagatttccgataactttaagaataatagactaaataaaaacttccataaaaagttgtacatcaagatcactaacccaacatcaaacaaaacaagaattacacgggactgcactcatagaggactaaaatgatttttatgacttttaaaaaaattgctaattctttttatattctgttttccaacgtcaaaaagttttccttcttttgagccaccttacaacaattgggtaaagtatgcttttgtgaacaaaattaagacacttattttctctttacccaaattctccagaatatggaaactattcctcaacagctaaggccaaaataatatcacccagcaactgtatgtgattcattattcaggaaaacagcacatagccttgtgtcatgttctgccccatgttgctaacaacctgcctgcaataacaaggttctttctttgcattgagagatgagacttcctgggaatgagccttctcagtgcctagggataaagaatgtctatcactctaacctaagtggagatttatcatcagtgcttccacatgaagatttttgatcaaaaaggggaaatgataacttacaggtcacctttggcaggcttccaaattaaccacctgggaaaggtcttatgattcatggcttaca[137 bp omitted]gcctcctgagtagctgggactacaggtgcccgccac[131 bp omitted]caccgcgcctggcccctctgagtaacaaatcttattgtgagtccctcaaatcttattgtgagttcctcaaatttttgatgtactgattaatatgtaacctattaacactgaaacggacactgatttgtttctgatgcatgaagttttgctgattgtcttgctgtaggacattttggccagtatgctgtaaactgtagccgatgattgtaacctctgaattgaacccaccaataaaaaagagcaactctgatatgagaagaccccctcccttctcctaaacgttcttataatggcattccaacttgtaacagactttggaacacacctaaattcgttggtgtgtcttcccaggttgatgctcacatttgacttctgctaaagctttttcaatttatttcagcctcaagagccttaattttgatcaacagtgtatagatttattttaaggaataggtgcatgaataatggaagttggcaagcctaaaattcacaggataggccatcctgctggagacccaggaaagagccacagttgcagttcttgtctgaaaccatctgctggcagaattccctcttgcttgggggagagcaatcttttgttttattcaggctgtcaggtgattggatgaggcccaccgactcatggagggcactctacccaaagtccaccaatttaaatgtcaaactcatccaaaaacacccacacagaaacatccagaataatgtttgaccaaatacctgggcaccatggcccagccaagtggacacacaaaattaaccatcatagctcccttgatgggggactgaggtaggcttttggatcaaggaggggatgttttacacctcagtgaggctttgccctccacttgggaccctggattctgtttgtgaaaggtcctgattgaagacaggagaaggagtggtaaccacagactgagggtgggggatcgcagactacacggctgtgtccacaatatcaggttccaaaggtgggaaataagagataacactaggatggccgggcgtggtggctcatgcccgtaatcccagcactttgggaggccgaggggagcagatcacgaggtcaagagattgagaccatcctggccaacatggtgaaaccccgtctctacaaaaaatacaaaaattagctgggcgtggtggctcacgcctgtagtcccagctactcgggaggctgaggcaggagaattgcctgaacctgggaggtggagtgagccgagatcctgccactgcactccagcctggcaacagagtgagactccgtctcaaaaaaaaaaagaaaaaagatattaacactagaactaatgacaaatacctgaatagtgcctaccatgtgccaacagtgtcctaaggactttgtatattttaatgcaattagtcccccagtaaccttgtgatatagtactcttattatccccaccgtacaaatggtaaaaaaaaaaaaaaaaaaaaaaactgaggctaagctggggtttgaacccagggagtctaactctagagatttcactctgaattactgatctatactgaagggcaagttaggaatggcttgactaagattagagataaaaaccaggagatagaagcatgttctagtgttaatctcaagtaactattttttttttttcctctaaaaggcttaagttaactagtgggtaacattgcctttggagaaggaggcctcagggaaactgttaactcttagatgagaacgaagaatgagtgtctcaggttttggtgtcagtgcttgcttagagagagaatgttcaatctttgattcttcaaaactttgggaattgtgtacatgtggctgtgcttgtgtgcattcagcagttttggcttgttcattcattgactcacttttttttttttttgatctccaggaatgtgctggcactgatgacacagtaatgaccaaggtaaacaaggacctgctctagcctgacaggctggtaaggagagacagaaaacaaggatcttagattgtcaaagtgcatcctagtttggctctatgagagggacttgggcgctggtagtttacctgggaagtgatttcaagaagcacaaattgggccgggcgcggtgactcatgcctctaatcacagcactttgggaggctaagatgggtggatcccctgaggtcaggagttcaagaccagcctggccaacatggtgaaaccctatttctactaaaaatacaaaaattagccgggcgtggtggcatgcacctataatcccagctactcaggaggctgaggtgggagaattgcttgatcacttaaacctgggaggccgaggttgcagtgagccgagatggcgccactgcactccaggctgggcgacagagcaaaactctgtctaaaaaaaaaccaaaaaacaaagcacaaattgggaggtgggaaacagacagggaagggaaaaaaagcccataacacgtgcattcgtgaaggggtatcactgtgagcaggaactcagtccggtggggatcctctgaggaatggtgacgcttgctcaggatcatcccaatgagaggtgggaactgggagtgcatctatttactcccatctcccactggctgagggttgtctccagggctggtcacttctccatgctcatgggttgtgcatttgggaagctggacacgttctgtgggggagaggacacccttaggctgagaagcagagagacccaggctcttgtctagggaggcagccagcgagctggaacagtctgcctcagctccagataaactcagaagctggccacagggctgtggacagcgtgtccactatgagggccctgtagtgagggacagttttgcttgttcaaggagccaaaaggactgaacaggtgatggaggacaggaggagctgggctggagaggtgggtagaggccaggcccccaatgcccagccaccagcataggggctgtggattttctaagtacagaagaagtcacagagggtttcaagcagaagtgcaaaatgagctgagggtaatttttaaaatatgagagaggagtaaatgcctggagaaggtaaggaaacttgggctccagggcatatgggcctctgagaggagcagggatgcatcttctattaagacaggagcaagagtgggcacccgcctcacacagggttggcctaggaacaggagggagcttctgttgttattttcttttctttctgccctggagaatgaggtgcccccactggccaaaatgggagttgggaggggattaaaggagagagaagtgacagttttctttctttcttttttttaattttttttttttttttttttttttttgaggtggagtttcactcattttgcccaggctggagtacagtggcgctacctcggcgcactgcaacctccgcttcccagattcaagtgattctcctgcctcggcctcctgagtagctgggattacaggcgtcctacaccacacttgggtaattttgtgtatttttagtagagacagggtttcaccatgttggccaggctggcctcgaattcctgacctcaggcaatctgcctgcctcggcctcccaaagtgttaggattacaggcgtgagcctacatgcatagccgacagaacagttttctaagacagccacaaagtgaacccaagagattaatacgggagggcggtccagagggcttagtctctgagtgaattctgtggtcatgaattgaaagtgtaacaaatcagaatcaggtcatttgaagtgattttcttgggtgacatttagctgctctggtgtgggtgagcagaagtgagacagttggattggagcaggctggggtttggccaggagagtgcagcagaggcagcgagaaaagggtgctgggggcctctcaagagagcagggggaatggggttggtggctggaacccagggccccctgtctgtatgtgcagggctcttgaaagatgtgcaccacagggagtcaatttggctatggtttttgagtttgtgctccacgactgaaaattcatttatttcccacaccaccctctctccacttcattccctttcattcattagagtaattgtgaaaagtatatgaagtatctcaatatttttttgagtataaaaacctattttaaacatcaaattgttttctaggcttccaaatgagttgtttaacatccaccgagatagaaaatatccaatcaaaagctatactagggggacatttatttatggagctatatatttcacaggtattacctcaatacagtcttattttataaaatttaaatacagagcaaaccatggtcagttaaaatttccaaatgcgagtcaaggtttattgcttattaatgaagggttctaacacaggtagcaaagggagtgagctgttcaaagatcctgggagagagatttgcctctcttagctggacatggacctttctttcttgcctcgttgtcacctagctagacacagcttgttgtctggcatcacgtggtcataaaaaaatcaggttcctctcagtggtggggcatggataatttggaaccaccatcagacatgactcgctaatcaaaaacaccaagtcacagatctgagaagtaaaggatagcgaattgatctgggcctattaattgaatgtttcaagcaacagggtttatatcccgttcaccctcaggtatcactcacaggcccagggcctggcctttcactgaagctctcaaaacatatctccaacctgctctcaaagacgatgaacgcacaatttgcttccacctcagttttgggcaaaacatcactttcttcttctttttttttttttttttgttttgagacggagtctctctctgtcgcccaggctggagtgcagtggtgcgacttcggctcactgcaagctccgcctcccaggttcacgccattctcctgcct[225 bp omitted]attactcatactcccttccctgtgggcaactgtattagccaaattttgcatggctacctgagactaggtaatttataaaggaaagaggctgaattggttaatagttctgcagactgtacaggaagcatgacggcatatgcttccaggtgaaatgggaaaggttcccttgtccccctcagagggcacgtgatgggggcgtggctcccttcttcagtgccccactgctcaaacctctaggggagcatacagatgggcaggctgtggggctccgaccccaaggcagtgtctaggggtgaatgttggcagctcctgaagccccagtgggtgtgtgttacagggtgctcttttagtgtgtggtctgtaggcggcttgtgttaaccagctcaagtagagccccttccttatcagaaggacagagggatttctgtatcccggggtttcttgccttggtgtaccagaataatcggatcacacgcgggcttggagaatgagtgcaaggttttatattgagtagaagtagctctcagcagatgggggagtcagaaggcagatggttttcccttggagtcaggctgcttggctgccaggctcaactctgaccactcaggccaaactccacatccttcctctgctcgatggcctgccggcctgccagtgcctggcggcctgctcttctgccagcatgctctccacgagcagggggttgtgtcttcttccgccgatgtattccttacgacgtccagcagctttatgtctgcctgcaagagtcttgttttttttgtcgttttggtacagagtctctctcagagattaaatattaatcaatattattaatatatcatattaatatatcacattgtattaatatgataataaaatatcacattaatataatataacattaatataatataaatatataacattaatattaataaatataataatattcataaatataatattaacatattatattatataaattgtatattatatatgcataatatattttatataatataaatatattatattatatatactataatatataataaatatataaatattaatatgatatatatgttatatatagtatataataattacataatatatatgtaatatatgtaattatatattatatattataattacatgatatatatgtaattatatataatataatgtatgtaattattatatataatattttgttataatatataatatatcatatgtaattacaatatatgcattatatatgtaatcataatatataatatatgtaattatataatatatgtaattatatataatatatatttaattataattaaaattatatatgtaattatattataattagaattatatataatataatatattataattacctatattatatatgtaattataactataattataatatatggacaccccctaccagatggggagtaatatccccctctcctccacttggaaattatgatccacctcgctggggggtggaaaacccctgcgagatggggagtgatatcatcctcctctcccccctggatattaccacccacctcgcagtggggtgggcacaccctgcgagatggggagtaatatcatcctcctctcccccactgaatattacgacctgccgtggacccacagcgtgtttacgatattgtgagtagtatcatctctccctctggaaattacgaactatttcacagacgggtgtacactgtctgcagtattgggggtaatatgatcctctcccctgctggatatgaagaagaatatcccaggagtgtttataccccctgcgatatttggtgtcatatcatcctctcccacattgaagttaggaacaatatcactgggggcgtgtacaccccatgcgatattgaatgtaatatcatcctcttctctcctggatcatgggaacaatatcatggggggagggtgcacactttctgcaatatggggattaataacatcttctcgccttccggatattaggaacaatgtcacacgagggtttacactttcttcgatattgggagtaatgtcatcctctcctcttttgaatgttaagaacaatatcacggggggatgtacaccacctgagatattgggagtaatgtcaggctctccctttcctggatattacgaacaatatcacagcgtgggtgtacacctcctgctatatggggtgaatatcatcctctaccttcctggatattaggaacaatgtcactgggtacacagcctgcgatattgtactaaatatcctctccccctccagatatcaggaacaatatcacagaagggttgcacactctctgcgatattgggagtaacatcattttttccttccctgaatattaggagcagtatccttgggtggttgtacacccactgttatattgggagtaatgtcatacacttccccctggattttagaagcaatatcacagggtgcagtgacgcgacctcggctcactgcaacctccatctcccgggttcaagcgattttcctgcgtcagcctcccgagtagctgggattacaggcacctgccgccatgcccagccaattttttgtatttttagtagagacagggtttcatcatgttggccaggctggtctggaactcctgacctcaagtgatctgcctgccttggcctcccaaaatgctgggactacaggcatgagccaccatgcccagccagggtcttgttttttattttatttatttatttatttatttttttgagagggagtctggcactgttgccagggttcgagtgcagtggcacaatctcgtcttactgcaccctctacttcctgggttcaagtgattctcctccctcagcctcccaagtagctgggattacaggtgtccaccaccacgcccagctaggtgttttttttttttttttttaatgtgtttttagtagagacgggatttcactatgttggccaggctgatctcaaactcctgacctctcgatctgcccacctaggcctcccaaaatgttgggattacaggcggcccagccgggtcttgtgtttttataggcacaggatgggcccctggcggtccagggtggtcttgggaaatgcaacatttgggcgggaaggcaggagcgcctgtcctcagctacgtccatgggggtggagccctagccagggaccaagccctcctttacccagcactttccttccctgctcccgaatcatgggtaggactcaggcagcttccagtcatggcgaaaggcaaaggaggagggaggtgtcacacatgacagagcaggaacaagagacaatggtgcaggaggtactatacactttgtaagtatatagtgatcccgtgagtgagatatcgcgagatctcactatcacgagaacagcaccaagtagacagtgctaaccattcatgagaaatccacccccaagatccaatcacctcccaccaggccccacctccaacattggggattacagttcaagatgatattgggtggggacacagatccaaaccatatcagtaaccaacatcaacaccttgggttccattcttccaatgtctttgtgtgtgtgtgtgtgtatgtgtgtgtgtgtaagaaaaatataaacataaatggtgccataccatgcaaattatttttcaattttattttactttttgataagtgttgggcatctttctatgtcagtgcatgaaggactactacattattttaatgtatgcagagaattccatggtcccacagtaggtcaatctttagccactctcctattgatacacatctacaaatttcccaacccccagcgttttgtgctagcaaaccagggtacaaaaactgcttttgtatgtatatctttgtgcgcaggtgggtttccaggaatgaaattgctagggtaaagggaatgcccatttaaacattggtcgatgacgcctaatgggttccaaatgacctcacaagttctcaaatgcttccagcaagtatctgaaagcagttttcacacatccttgctaatatttgttactatcaatctttttaattttttggcaatataatgagtataaaataatatctcattattgttttaattttcatttccctggttactagcggaagctgtgcattttctcctatgattatcggcatttctatttttcttctgtgaattgcctatttatatcatttgtctgattttattgtgtgttttattgatttgtatataatcttgatatagtttggctataaattctatgtgagataagtgtgttgcatataatgtcttctatttgctgtttgtattttaactgtatttgaggtgccatttttcaacaaaaatgttttaaaattttatgagattaaaaatgttaatcctctattatatggcttctgggttatatgtcttgttttaggaaaatctttccaataccaagattataataattacatcatagttttattccaactcttttatagtttttttttttacatttagcatttttatctaacaggaatttattttttgtatggtacaagttatgtatctaagttatttttttcaaatggatatggagttttctttaaactgtttattgaatagttctttctttcctaggaattcaaaatgcttttatagcaaataatattttgctactaataataaatgcacttagaacagtttctaattccttattatatcattactgtagtcattgtagatgaaattgccatatatacacaaaactgtagatttgattccattcctgtgatccgtatatctatttatctcagtcagttcaggctgccgtcatagaataccataggctgggtgacttaaacaacagaaatttcttgctcacagtttcgaagactgggaagcctaagattagggtgtctgcacaataagattttgttgaggaaaaggtactttcttggtccacagatggttgtcttctttctgtgtcctcacatggcacagagcagagaaaggaatcaggctgtttgctgtttcttcttataagggcaccaatcttgtcatgacggctctagtcacacgacctaatgacctcccaaagtccccgctccagatactgtcattcgggaggccatggtttcaacacaggaagttttggggggacataaaaataaacataatccactccactatttgtatgcctacaccacatcatttaaataaatatgtgcgtaatctttgttctaacatctatctgggcaaatcctccctcattttctattatttggcattttcttttttctttttctttttttttgagatggagtctcactctgttgcccaggctggaatgcagtggtaccatcactacaacctctgtctccaggttcaagcgattctcctgcctcctgcctctgagactacaggtgtgtgccaccacacccggctaatttttgtatttttaatagagatggggtttccccacgttggccaggctggtctcgaactcctgacctcatgtgatccacccaccgcagcctcccaaaaggctgggattacaggcatgagccactgcacctgacctatcttttggcattttcttgaggatagtcatacatacatgattcaacctctactcctctgttggttggaagtcatatactcttctgaagtttttttttgttttttttgtttttttttttttttttttttttttggcagagtatctctctgtcgcccaggctggagtgcagttgcgcaatctcactgccaccgcagtggcaccatcactgcgagctctgcctcccaggttcataccattctcctgccatgatctctctagataacaatatgctttattgacttatcgaagtctagtatcagttggtacatttactttcctcttgaacagggtaaggatctcagaatacttttattccatgttctgctctcttggctcatgtgctgttgttctgcattttaattctatatgcatttaagccttcacagggaatattattagtttttaaaataaactctgttcattttggtttatccatatatttaccattttttttaattccttgttgttaatttgcactattgcatctgggatcatttccttttatattttctttagttcaaattggttagtggtgaagccccttggtcgtttgctgctctaaaaatgtctttatttcaaattgttcttgaaaagtattttcactgggtatagaattctagattggcagtattttcttttagtccattggaaataccacccttctgtcttctgtattccactgttgctgttgagaagtcagctgtaggtctgtttcttcttagaagtgatacctttcgattttctctctgtctttggttttatgcagtttcactgtgatgtatctgggaatacatttatttttatttattttgccaaggagccattggggtcttgaatccatggattaatttatttcactagttttggagattttaaagccattttacttgtttaaatattgcttccaacgtattctctctactctccttccaggacttcagttaaacccatgtcagtctttctcaacacatcccctatgtctcttactcttttttctgtaatttccatctctttgtcttttggcacttcattctaaatattttacctaacatatatttcagttcattaattgtctcttcatttgtgtctcaagttcttaattttaatcattgtacttttagcttataatatctatttggtgcttttttttttttttttttgagatcgagtcttgttctgttgcccaggccggagtgcagtggcacaatcttggcttactgcaacctctgcctctggagttcaaatgattctcctgcctcagcctcccgagtagctgggactacaggcacctgcaccatgc[133 bp omitted]ccctgcctatttggtgctttttcaaatctgctttgacatattttacgttgctagttctttttcatttggttctgccaggtgctagcaatctcagatcaccttaatcccatttcaggtttgaaatattctagaacacctggtaacttgagactgagaggcagcctgtgtaatggttagtttacttctggttcctccttaggcttagaactttggcatctcagctcttagtgtgagtgtgtcattaaggttcctacccctgtccctcttgtcttgtgaatatttcaaaatgggtcttagcttataaattacttcttttggatttgtaattgcttggggaacaaaggtggccttcaatggcaggctcacctctttcaatttctatcttattttagatcttggtgtgataatttctcactatcttgttagctcttggatgcatttaggaaggtatttatttatttatttttaattttaaaaattccaatagctttaagagtacaaatggtttttggttacatggatgaatcatatcgtggtgaagcctaggattttagtgcgtccatcacctgagtagtgtacatttcacccaataggtagtttttcatccctcaccccactcccaccctcctcctttctgagtcttcagtgttcattacaacactctgtatgcctttgagtacctattgtttagctctcacttggtctttgattcctgagttacttcatttagaataatgacctccaggccaggtgcggtggctcacgcctgtgatcccagcactttgggaggccaaggcaggcggatcacaaagtcaggagatggagaccatcctggctaacacggtgaaaccccgtctctactaaaagtacaaaaaaaaaaaaaaacccaaaaattagctgggcgtggtggtgggcacctgtagtcccagctactcgggaggctgaggcaggagaatggcgtgaacccaggaggcggagcttgcagtgagccaagatggcgccactgcactccagcctgggcaacagagtgaaactccgtctcaaaaaaaaaaaaaaaaaaaaaaaatgacctccagtttcatccaagttgctgcaaaagacattattttgttgttttctttaaatgtctgagtagtattacacacacacacacacacacacacgtatatatataaacattatctgctcatcagttgatgggcacttaggttgattccatatctttgcaattatgaattctgctgctataaatacaagcatgcaagtgtctttttgatatagtgatttctttttctttgggtagatatccagtagtgggattgctagatcgaggtgtggatctacctttagttccaaaaagttgcttttaaatattgtgtccatctttgtttgtctctgaggtgcgcgtgtaggtcggtttaaagcaaaatggtttgccattatttgaagtggaagtcctacattttctttttcatttaaattttggaattagcgttgtcaagtttaacaatctctctttggaatttcgaatgtgattactttgtatttatagatacatttggaggagaaaagacatttttacagtattgagtctttccattcaagcttatttaaaatttatcttatgccttagtaaagttttatacttttattaatcgataaattgtccactcatttataaatttatttctgagtatttttataaatttcattgttaatgagaatgagatcctctattccatgagctggcaatctttgtttgtgaagggccagatagtaaatattttaagctttgtggaccatatgatctctctttcaaataaccaactgtaccattgcagtctcaaagcagccccagacaatatatgaacaaattggtatagctatactgaaataaaactttatttacaaaaacaggttgtggaacgggcttggccgcatgggccataatgtgccaagtcctactctatcctattacgtttttccaactgtgaatttgtgttttaaagctattgatttaaaaactttaatcttttttttttcctgaaattttcttttttttaaaatttattttattattattatactttaagttttagggtacatgtgcacaatgtgcaggttagttacatatgtatacatgtgccatgctggtgtgctgcacccattaactcgtcatttaacattaggtatatctcctaatgctatccctcccccctcccccaccccacaacagtccccagagtgtgatgttccccttcctgtgtccatgtgttctcattgttcaattcccacctatgagtgagaacatgtggtgtttggttttttgtccttgcgatagtttactgagaatgatgatttccaatttcatccatgtccctacaaaggacatgaactcatcattttttatggctgcatagtattccatggtgtatatgtgccacattttcttaatccagtctatcattgttggacatttgggttggttccaagtctgctattgtaaatagtgccgcaataaacatatgtgtgcatgtgtctttatagcagcatgatttatagtcctttgggtatatacccagtaatgggatggctgggtcaaatggtatttctagttctagatccctgaggaatcgccacactggcttccacaatggttgaactagtttacagtcccaccaacagtgtaaaagtgttcctatttctccacatcctctccagcacctgttgtttcctgactttttaatgattgccattctaactggtgtgagatggtatctcattgtggttttgatttgcatttctctgatggccagtgatgatgagcattttttcatgtgttttttggctgctaaatgtcttcttttgagaagtgtctgttcatgtcctttgcccactttttgatggggttgtttgcttttttcttgtaaatttgtttgagttcattgtagattctggatattagccctttgtcagatgagtaggttgcaaaaattttctcccatttttgtgggttgcctgttcactctgatggtagtttcttttgctgtgcagaagctctttagtttaattagatcccatttgtcaattttgtcttttgttgccattgcttttggtgttttagacatgaagtccttgcccatgcttatgtcctgaatggtaatgcctaggttttcttctagggtttttatggttttaggtctaatgtttaagtctttaatccatcttgaattaatttttgtataaggtgtaaggaagggatccagtttcagctttctacatatggctagccagttttcccagcaccattagagtccaggaccagatggattcacagccgaattctaccagaggtacaaggaggaactggtaccattccttctgaaactattccaatcaatagaaaaagagggaatcctccctaactcattttatgaggccagcatcatcctgataccaaagccgggcagagacacaaccaaaaaagagaattttagaccaatatccttgatgaacattgatgcaaaaatcctcgataaaataccggcaaaccgaatccagcagcacatcaaaaagcttatccaccatgatcaagtgggcttcatccctgggatgcaaggcttgttcaatatacacaaattaataaatgtaatccagcatataaacagaaccaaagacaaaaaccacatgattaactcaatagatgcagaaaaggcctttgacaaaattcaacaacgcttcatgctaaaaactctcaataaattaggtatattaatgggacatatctcaaaataataagagctatctatgacaaacccacagccaatatcatactgaatgggcaaaaactgcaagcattccctttgaaaactggcacaagacagggatgccctctctcaccactcctattcaacatagtgttggaagtcctggccaggacaattaggcaggagaaggaaataaagggtattcaattaggaaaagaggaaatcaaattgtccctgtttgcagatgacatgattgtatatctagaaaaccccattgtctcagcccaaaatctccttaagctgataagcaacttcagcaaagtctcaggatacaaaatcaatgtacaaaaatcacaagcattcttatacaccaataacagacaaacagggagccaaatcatgagtgaactcccattcacaattgcttcaaagagaataaaatacctaggaatccaacttacaagggacgtgaaggacctcttcaaggagaactacaaaccactgctcaaggaaataaaagaggatacaaagaaatggaagaacattccatgctcatgggtaggaagaatcaatatcgtgaaaatggccatactgcccaaggtaatttatagattcaatgccatccccatcaagctaccaatgactttcttcacagaattggaaaaaactactttaaagttcatatggaaccaaaaaagagcccgcatcgccaaatcaatcctaagccaaaagaacaaagctggaggcaccacgctacctgacttcaaactatactacaaggctacagtaaccaaaacagcatggtactggtaccaaaacagagatatagatcaatggaacagaacagagccctcagaaataacgctgcatatctacaactatcagatctttgacaaacctgagaaaaacaagcaatggggaaaggattccctatttaataaatggtggtgggacaaactttaatcttaaagttagcaaatttaataaactctgattagttctactgctttttcatctgattctcctggattttccagagaggtgagtatatggtctgtaatgctgacaaatcttcctctttttacctgataattacacattctatttaatttttgtgtcttgttgcattgactagaacctccagtacaatgctgtgtaattagagtgataacaatcatcttaatattttatattttctgttatgaaaatatttcagatgtttttaccattatctgtgatgtctgctgtgagtgattgacagattagctttgtaagattaaaaaagttttcttctatttctagcctactgggggcttaagaatgttgaatttgatcaaatacttttccaccatcaattgagataatctcatgtttttattcatttactttattaatgtgatgatttacaacgactaatttcctgacattcaattgctcatatatttctggggaaaattttttctttgtgataatgtattagtagtttagtacattgctgcatttgatatgcaaatatattatttaacattttcacattcaagagcttgaatgagattggctttcaggatattttttggtgttacacttactcagttttggtatcatggttatggataacttacagaatgaattgagataaattctatggaaacttcatctgaaatatttcatataattaggtattttctgtttattcaggattcggtataactggtccccaaatcttcataatgttgtgcctatttggagtgtaattattgatcattatttcaatttcttccaaaattaattcattcagaatttctgtccgtacttgagtacatcgaggtaattttccaagaaaataatttatttttatctaactttaaaaatctatttgataaaattatcaattttttcctatactaaaaaaatcttttccatatctataatttaggcatgtttctgattctgaatgttatttattttgctgtttctcttatttcttcactgtaattactggagatctgtacattttattggtatttttaaaaagctttcattttactgatcaagtctactctttgttctatttggtttttgctttcatatactatgctattactacctatgtccagagggaaaatattttcatatattattagtgagattttgatggttaacattttaatttttcaggtatttgattaatttgaaagagatactttattcctctttgaaagcctgttctgagtgctactgaactcttagttcatctgtgcattgagcgtgattcctctctgacatagcgttggttttctgtaagtgcttgatgggtttttatgtgtcctcacttccaggacacctgagcactgtgtttcctgtggcccatctgtggctattatgaaggaggggtggggcacactcaggagtgacggcttgatcgggagctcgttttcctgagcgtgccatccttcctcgtggtcagtgtggtccgatggcctcactggccacgttggacacagcttcacactcttggcctcaacactatctgtccaggggagaggggcggggctgagctgcaaggagtcgtgataacacctgtgcaatgtgtctatcagggaagcttgttagagattcagctaccctgagtgctgcttcccactcatgccctctctgaatgaccagagtctactctctcttctattgaaggcctttgagtttggaattccctggaatgacttctcccttcaatggggtcttctccttcagcagtttcctgtggttttgtttcatttcagataaaatccagtttatatttctcaaaaacgttcaccatttctgaaatacaagtatcactttttattgttttcctggcctattatatatttttaaagtcattttattttgtttcatagaattataaatagccatgctcactactacacatgcaattgcacttttaaatgggtccgtgttttattaacctcaaacacttatccacatttgaaagatagttgtatatctctacaagagatgagagttacacaaatataaactacataagagtttttctgtaccgagagtatttagtactcctgtgaattcaaggctctgcagtgatctactgcagtatacaggaggagaataatgagctaaacctccagaccaaatagggtggccacagattagtacagtaaggcaagtaaaaaggaaaatgaatataatctatttgtccctgtaatttccttttcttttttctgagacagagtcttgttccatcacccaggctggagtgcaatggcgccatcttggctcactgcaacctccatctcccgggttctagcgattctcctgcctcagcctccctagtagctggggttacaggcgcccgccaccatgcctggctaatttttgtatttttagtagagacagggtttcatcatgttgaccaggctggtctcgaactcctgacctcaggtgatccatctgtcttggcctcccaaagtgctgggattacaaacatgagccaccatgcccagcctgtcactctaattttctcttttgagatttatcaatttgaaaaatatttttttaatgttaatgtggcttatataaatttctgtatatgtgggggtgaaagtgatgatgtatataaattaggataaggaaaaatatgtttgctgaatacgggtttgatggctttcagtctgtttgctagtgattgttaaacacgatacgtgtgttggaggtccccgagatcctccccatggtggatttgctagggagactcgcaggactcaacatgtagttgttgtcacagctgtggttcattacagcaaaaggatacaaagaaaaatgagcccagggaaaaggcatgtgaggtaaagtctggagaaagccaggtgcaagttttccaaagttgtctctagtgaagccacacaggacacacgtaagtcctccagcaatgagttgtgataacacctttgaaatgtgtctatcagtgaagctcattagagattcattaccaagggtttttattgggagcaggtcactaggtactctgtgtctagcatggaccaaatttggttctggctttccagaagaaaagcaggtgtcagcataaaccatattgtgcatgcaaatggtttaagcacagggagccattcttaccctttaggcaaaattttgcatcaggataaagaactgtctaccattcaagttcccagatgccagccaaggaccggctttgtaagcagccctttctaaggacagcagtcctggccctactatgtgaactcttttctgcaccatccctaacctttgcttttgagtagagtgatggagcaaataacacgttactgactaaatctgcaacacagcttttttccccttcttttttcctactcaaaagccaggagcacgtggggctgcttcaactttcttacaaaattggtgtgtgagagttcttattgattgccataatctgaccaatccattcaatgactgattacttctttcatgaaatacttgcggcgtgtctactatatactagatgctgatatggagacggatggaggggtgcatttgtttaatagtcaaatgcttgcacctgacccataaatgtaggccttccttcaaggccttccttatgtaggcctacataaatgtagacctcatccttggtcaactttttcctgccatttttcttcttcttcttcttctttttttttttttttttttttttttttttgagatggagtctcgccctgtcgcccaggctcgagtgcagtggtgcaatctctgctccctgcaagctccgcctcccaggttcacgccattctcctgcctcggcctcccgagtagctgggactacaggcgcccgccaccaagcccggctaattttttatatttttagtagagatgggatttcactgtgttagccaggatggtctcaatctcctgacctcgtgatctgcccgcctcggcctcccaaagtgctgggattgcaggcgagagccatcgcccccagcccctgccattcttcttacaattccgatgacttcaatttctccctataaacttatgcttcttgaaactatatctctagcctaaatccctctcccattttcctaagacccccatatctgactgtggactatctccttagggctcctccacagctgtctcaaattcagtttattcaagactgaacttggcattttcccccaagtctgttcctcctctttatgtttcatattctggttaatggtatctccatttatcccactaataaaattacctggaagtgattgttgactctttcctctcctcccatccctaaagccttggtcacttagcagttaactattgctgggtaacacaccaccccagaagtcaatggcttaaaacaattgttgttatcactggcggctgagtgagctgtgccgggcttagctggcgtgtctctcctcttcttcccaggtccataaaaacacaccaaacctctcaaggcaccagcttggaacggcatagtgttacctctgccttactctattacccaagtaagtcacagggctgaacccatactctgcccgttcagtgggaggagcttcaaagtcaaaagggaaagggtatggataggagaagaggtgaagaattggaaccaatagtgcaattgcccatgttcacaaagccctggagcagttccctcttaagtaccacctcttgccttccatcgcctttgctatggccctcgttcagaccttctcagtgctctcctggcctactgcaacatccctctcttggatgttcttgcttttagactctccatagggcatcaggtctagctagatgcaaatctgaactgaagtgaagagtcctctagggctccctgtaccctcggagaaagtctgagttcatgcatggctttccatgatgcagacccttcctggtgcctgaagcttagtttccgctactctcctttttcatctttttattctgccttgctaagttctctggagttcccacacacactacgcagtttcacaccatcatgcttttgcacaggttacctcgtgggcctggaaagtcctttccctcttgcctgcccagggaggccctccacacccttcattactctgtggcatatttttccctgaagttttccagaactctccccagccaaggtgactgtgcctcccttagtgtccccaccaccctggaaccctgtgggttatacatgtatataacatctaatcatgtggccatgacgttctctaggcctcatgtgttgtatgcaccattgtatggcacaaaattggctaatatcaagctacaacagcaaagctgaggtagatgtgtccaaggccatatggcctgcaaagcctgaaatatttactacctgaccctttacagaaaaagttgattcagaggtttgcacttggaccagaaaggcgacttcctagggtgagttggtggctaacaactcagtggggcttgggctggatttccccaacatgctcatcaggaaggcaaaaccggaagtgctgatagcactcagggcagtgttcccgtactcctggccattctgtgttgattggcatgacaagtgtggaagtgtaggggctcttttgtgatcttgggacaggctgggagcttctgttctcattgtgcatttctgctctgtgggcttggtgctgctggtggggacaacccaggtctggcctccacagggacaatcacagggcatgcaggtctaaagtcaaggccccttcagaggactctccctgtggtctgtagaccttcttgctaattttagcaagaattcaatatatttttcaccaaatgatggatgaatagagggatggttggttgatttcaggttcacaggaagagggtattaaagactgcctttataccttgtgggtgacattaaattggagcaatcataaaatgaaacagggttatatttcttctagtattaatatacagtaattctaattggactcctatggtaattcttactggacttatttttcactttgagactcaattaatttagcaattttaattgggtgtgtggaaattcttataggccaatgcagatattgttgtacatgtaaaacttttagaggttaatctaaatattagatcttattctctggggagagtttgggagcagccaccatggaactgaatgctactaacaatttagagcaggggtcagcaaaatatggtggaccggccaaatttagcttgcagctaattttgtaaataaaggtttccaggaacacagccacacttattcatttatatattgtctatggctaatttcaagctacaacagcaaagctgagtagatgtgtccaaggccatatggcttgcagagcctgaaatatttactatctgaccctttacagaaaaggttgatttagaggcttacacttcagggcttcctagggtgagttgatggctaacagctctgtaaatgtcctgtgacccctctttttatttcatttggaaaagatgctgggatttcgccaatgcttagaattatatttaatacatatgagattcctgggagatactttgacaggcattataaagcatctactatgtgctaagtgctagagatgcaaagaccatcgggcttgcaaagtctaaccttttgctgagatgttttgggcccaacactgctgtccagccatggggctgtctgtgaacctgagaatcattattctgggaggggtgagatttccaattgaggcttttattgacctttatgatctgagactcagaaccaagcgatattgggaaggacacacaggcttatggaagttgtccaacttgaacagtttgggtgagatttatctgcaggagtggcaggcttatttcccctgacaatttttttatgtttcattggtcttatttcactgcttgggaaagattttcccctaatatttttttgtttatttttttatctggtgataatgtttttgaaaatactaagtggtagaaaagaccactcggacacaggggatttgagcaaacctagggcttggaagagaccttttgtcctgatgagtccccagcaccatcattagagccaatggcagagctgccctggggttcctggacctcctcctggccagtgaactggagtcttgcatcccgtgaccatgagagacgcattctttccgagtgttcttggatcttggcatccttattaggggaatcagagttgagggcgatggagtgtcccaagatctgggagagaagaggctgccccaggaggtgccaatgctgctactgaagcctgggttttcagtggaggatatttgagcaactcagtgactggaaaaggggttaagctgcaaccaagtgggaggcggaagggcagtggggccagggctgcaaaactggaaagaagagcaagcagtggggctttggctggatttccccaacacactcatcagtaaggcaaaaccagaagtgctgatagcactcagggcaatgttcccctcctcctggccattctgcgttgattggcatgacaagtgcggaagtgtgggggctcttttgtcatcttgggacaggctggaagcttccattcccagtgtgcatttctgctctgcgggcttggtactgctggtgggaacagcccagttctggcctccccagggacaatcacagggcgtgcaaacctaaagtcaaggccccttcagaggactctccctgtggcctgtagaccttgtaggtttcaattatgcatttggtttatttctgacttgcttcaacccctttagatcctaatagtggccatggaaaatgacggctgtacagtatatatataatttgagatggagtctcactctgttgcccaggctggagtgcaatggcatgatctcagttcactacaacctctgtctcccgggtttaagcgattctcgtgcctcttttgagcctcttttgagcctctcctttgagcctctttttctttagctgtaaatgagggataacaattgcctctactttccacaattgctatgaggattgaataaaagatgcatggtaagtcattggcctagagtatagagtaattatattttcctacaggtttccatttttcctattattattattattacccccacatgattttttttttttttcgggacagagtctcgctctgtctcccaggctggagtgcagtggcgtgatcttggctcactgcaacttctacctccctggttcaagcaattcccctgcctcagccttccgagtagctgggattacaggtgcatgccactatgtccggctaatttttttgtatttttagtagagatggggtttc[133 bp omitted]tgaggctggttggaaagaccttgatgcgttgagtcggggcctgaagtcatcactgggaggtgagggtcttataaccctatggtggagatggacatgggttatgcttaggcagctggggaaggagtgagccaaggagagagaaatataacatccatgcatttccatctgaggagtctaaattccttctttgtccttttaatctggattttttagacctattaactgtaagaatgactgtgttgattaagctctcctaatacatttttgaattcatcaccaaagcagtaggagtctgtcctacatgtctcctcacctccccaccccacaaaacaccccagcctacaacacagaagttgccctttgtttttgctgaccccaatcactgtcatagcactgggttgagggccagcccagcatttctgaggatcatatctttggtagccaatcccttgtccctctggaccttcctcttcttccagtatctcaaggtcttgttgaaatcttgagaacactgttgacctcccttccaatggtatgacctaattcatttgcaaagggcttatcttccaaagggagagaggtccatgatagaaactcagcaatgtgattattgcataatgtacttgttaaattcaatgaacagtaaaaagttccttggcatagcttaagcaaaagacagggcttgattggctggatgtgtcacagaacccaagggctgaacggcagtggacctttaaggcctggtactcagcaggaaagccatcaggatacaaggctgccatctgcctcattgcctgatggcctcttatttctatttttttttttctgtatgtgagcaccttttcattcttttttttttcttaatttttttttgagacggaatctcgctctgttgccaggctagaatgcagtggcgcaatcttggctcaccgcaacatctgactccctggttcaagctattctgctgcctcagcctcccgagtacctgggataacaggcacacgccaccatgcccagctaaattttgtatttcaccatgtattaatttttgggtttcaccatgctggccaggctggtctcagtctcctgatctcgtgatctgcctgcctcggcctcccaaagtgctggaacttttcattcttctatcttcagcctgatcttttctattctgcttacggatggctcagatgtggttacctgggccctggctttccatgacctcccaattcataattcttcagagaccgattacagtgtatattaatttaaaacttgtaggaggaagactctggatagcccagccaagccaatggattggctccccctgtgtcagctgtgactcaccagtcaccaggtgccaggggatgcagcgtgctcctatatttcctgaacatcttcatgcaaataggttctggataacacacccccttgaaagagactttccccatgttggaatggcattctgcacccttatgtacagacataacctcctgcaggccgagcagcagtggcctgtttggagcaattttgtaccgtcggcagcatgactcctcagtggtctgtggatctccaggtcagagccgtctgcctgcaggttacatacaggctgaaatttcaccagcagcagctaaagtcaggtcacagcccagtcattataaatgccaaatgtgtttggtcaaaagatgacctttgttataaactacaggtcccaagaacattgccagctgggaagtacaagattcttttaaatcaaagaattgagagaaaatgcataactgtgcaaaatcaccagcaagggtgcctggaagctactgcttcttctagtcaaatggaaatctttcaatgatgccaggtggtgctgttaagaagcagaattcttcccctaagcccacatgttcatcaggttccttaaaccaacagcttgagaaatttagatttccttcagcattctttcaaactctgggcccagtgatttcttctgtaattttagaaaagcttattatgccatttctttggggggcctgggagaatcaaccctttcaggtttcagttttctcagggtggaaatgggaagctgaacaagatgatccctatggccccctcagtccagattttctgtcattctgtggcaagagtccaggcttgggtgaagcaggactgacatgataaactttgcatggcttaaaatatgagggctcccaagctcctgggtctgtgctcctctttcatctgtttcatggtcatgccgtttggctggtctttctttcttttgtttctcttttctttctctctttctttctttctttctttctttctttctttctttctttctttctttctttttctttctttctttctttctttctgtctttctttctgtctttctttctttcttctctctctctctttcctttctctctcccctgctctccctctctcccccttcccccttccttccttccctccttcctccctccctccctcccttcctccttcctttttcctttttcccttcccttcccttccaagacagaactcactctgttgcccaggctggagtgcaatggcacgaccatagctcactatagcctcaacctcccaggctcaagcaatcctcctaccttaggctcctgagtaactgggaccacaggcatgcaccagcacggctggctaatttttattttttttaatgttttgtagagacagggtcttgctatgttgcccaggctggtctcaaattcctgggctcaagcaatcctcccacctcagtctcccaaagtgctgggattacaggtgtgagccactgtacctggccaccctttggcttttcaaaccatccttgagcaagccttgaggcctctgttggagagtcttctttgtactagtccatcaacatcttttgttcatttggattctctgcgttgaagttagacttgatagttgattaggacagaagctaaccagggagggctgagagaagaggtgttcgagagagaaaaagtcctctcgctgctgctgctcctgcccctgttgcggcaggaacacttccgtcttgtcagtgtcttggaggaccaaacatattttgacatatcctaagacatctagaatgatccaaaaattatcagaaggcttggaaataaaagtaggattctatgactaaaagggtccttagagtaagttagtttaatgtcctcatccagccagggatttctgctccatcgtcaccaagaggtagtcaatgaacctttctttgtatagcccaagtgatggggagctcactaccccctgaaaaagctcattcaatttctgaacatctccaatcgtatcagtttgttccacctgcccagctctgatgggtcccccttaggagctactcacctgaagatgaatcttgggtcgccagtttaatcctgcagatatttgtaaattgtgagctcgttcattggaatcttcccctttccaggctaggcagcctgagaaccagcaattgcttttctaagcattccaattcccgcctcattttggagggcactttagaactctgttcttcaggtgtgacctgactcacacaaaataagcagttgtgagcttctccccaattctctaatgcctttggaaaagctgtttgctcacaggtatttgccaaggaggcagagggtgtgtttcagcttcttgggttctgtgtaggggcatttagatcaagtagtatgtcaagaacagattggcctggctctgaacgtctgggaaaatcctaatgccccgtttgctgtcagctctttccaggcctttcttatagaatgtaaaagcaaaaatagttctcatagataatctgccttagcctctcttcccattttacaggtggggaagactgagtcccagagggaggaattggatgtcactcagtgctagaaaaattggagccaaggtcttctggttctcaagttcagtgagatcacctttcatctaaaagagaaatgcggatgatccctgaatgtctttggtgcctgggatccataggagctttggccccatggaacttggatacccatcttcttcccgtggtctgtgatttctcccatgctgatcctgtatctgcactctgagctcgggagtcactgcctccagccttgatctttcttctcctgcccccaccatctctggaactcagcctctttccaagtcatcaacttattctcacaaaggcaagaataaaagaaaatctgttaatagtcaaccaactttgctaaacaagcaactctttcagggtgactatttattgctacttatgatgacagattatctttctgatttcccccagcacatgtctccagaggaaattagatacagtattttccttaagcggggccaggagagaaaatgtttctataaatacttaacaacttgtcaggggagattacaaatattggcacgtccttcacaatgtcatgttggttactgaaactgttataagaaatcaggatggtttattttcttcctgctccaaggtagcactacattttctgaggctggaagaggtgctcccaaaggacaccagactcaagtccaggattctggcctcccccgcctctgtcgccccaccagggtcagagagctctgggtccattcgctccactattttcctgcaaagggaccttgagtaaaccccttagctccttagcgtctcagttttctcttctgaatgataaggatactatgactcatctcaaggtattgcaaagatcaaatgaggtgttgcatgaaaatccccttatacatggtgggtgagccacacatacagatcctgttgtgtccccctcctggtccatgaagaccacccttatcaacagatatggactgcacaaagcctcattgtcttcctacttcccgtgttgtttaggaggaatttgaccataacaagaataatatgtgcagttaataaaaactaacacttctcaatctcttactctgtggcaggattgttctaaggccttcacgtggattaagtcatttaatccttccaacaaccttatgagagaggtactatgggtttagtatcccttatctgaaaacctgaaatccaaactgctccaaaatctgaaacttttttcgtgtcgacatgaggctcaaaagtgacgacgctcattagaacattccaaattttggatttttggatgaggagtgctcaaccagtatgtataatacacatattgcaaaatctgggaaaaatctgaaaaacacttctggtcccaagcattttcaataagggaaacagtttgtagtagcatctctcttttacagaggaggaaacggaggcaaaacgacctgctcacagccacagaggcggaagtgacggggctgagattggtctcaggctgtgatattcactgcactaaattaacaagctatgtggtccctgaaggagggctggttctaattcctttctagtaatctctctccttggtacctgtaaggatttcctcttgatcctttatgttctggagttttaccattatggatttatttttaattttattattattattattttttgagacagagtttcgctcttcttgtccaggctagagtgcaatggctcaatctcggctcaccacaacctctgcctcccgggttcaagtgattctcctgcctcagcctcccaagtagcttggattacaggcatgtgtcaccacacccagctaattttgtatttttagtagagatggggtttct[144 bp omitted]agatccattgtctcacgtcttacctaagttctgtgaaattcccagctgttatctcttcaagcactgattctatattatctctgtttctcctggaacatcctagcagacctgtattgaagcttttggagttgattttcatgtccctcaacttttcttttgtatttttcagtcttttaatcttttttgctatggtccgtttgctctttatgtctcccattttgttctttggctatgttcagccttctggtcagtgtctctgttgagttttacaatctcattaactctcttttttcatttctaaggtttctaattggttccctgtcatagccatttcctttttattccatcattttatttcttgtgtcatgcttgcaatccccttcttgacctctttaagtcgatgacaatgcttgtcctgtagcttctcagaatgttctgtttgatctcttttccctcacacgtggtttcattcatagagtttgttgtgagccctccacggtggccacttcctcagcagctttgtgccccctcactgtgagttcacctggtggatcctgagctgggctggcctccagcggggtggtgcctcagcagcctccacctcatttctaggtcccatcccccttggcactcaggtccaaaaggtcttggtgctatcttgggtggacaggaagtgatttccagttcttggccttctctgggaggcatccctcttggctgcagcctggggagggctatgtggttttagcctccacatactgctactgtgttgctttgcatttcatttcttttagaagccttgctttaaaacctgcagagatatcccttccttatttttgaatatgcatgcattccccctcaacactagaaaagtttggagtggaaagtagaggtgttgttgcttttttgttgttgttgttgtttgcttttttgagacagagtcttgctctgttgcctaggttggaatgcagtgcggcacaatcttgactcactgtaacctccgcttcctgggttgaagccattcttctgcctcagcctcctgagtagctgggattacaggcacgtgccaccatacccggctaaattttatatttttagtagagacagggttttgccatgttggccaagctggtcttgaactcctgacctcaggtgatccacctgcctcagcctctcaaagtgctgggattacaggcgtgagccactgcgcctggctgaaagtagggtttttgctttgtctttttccaccatcttgcatcagaaactctttctcattattattctgtgttaaaatgaaataatcagcgtatacaaaagaatatatataatatttattataactcataataatatataataataagacatagacctgtgagttggctcctaacttatcaccaagacaagaccagtactgttgaggtcacggcatgttccttccggatcccatctctttgcctcccctcatgcccaggaaacagctcctcttgggtattttctgtttatctttctcttgattctcccctccattattttttcaccaaatttttctttttctttctgtcttttttttaaaattgtttaattttttttttattttgagacagaatctcattctgttgcccaggctcgagtgcagtagcacaatcttggctcactgcaacctctgcctcccggattcaagcaattctcctgcctcaacctctctagtagctgggattacaacaggtgcatgccaccacgcctggctaattgttgtattttttttgttttttagtagagacaggttttcg[143 bp omitted]ctctttatcactgtactataaatttacaaaaataattatgaagctgcaaaaataatgaaaatacattgtcacatgaatggaccaacgagtccatggaacagaacacagaaatgaacagactcaagtctgtaaggaaattttctctataataaaacaggtaatctaaatcaaggcattcaaaaaagatgtagggccatttgttacctatttagaatgaaatacattctagattcttatctcacgccttacataaaaaggaatcgggaatgtccagaaagacagtggtcgaggcagagctggctgtgtttctctgcagacgtgtgctatttccccctcactggatctgtgctgcacttgagttattgtggggagaatgggatcaaggcacaggagagaccttggcaagtgggaaaatggctatccacgttccctgagtctcacctgcttccagatcctgctgtgtcacagaaaccccgcctgccggcagccagtgcctggggaagaccctgggcttctgagcaccccttctctaaagaagcctgtcctgctggaggtcctaattaaacacaggacaagccagcgtctgcagcaacgcctttgacaggggagatagctggtgcgtggcaaacccggccatttatcaaacgtacacacttgcattgctcagtgggtttgggggccacattaataaatcacttttttatttgaaagcacctcccaacacacagtagagccacttgagtcatctctctgtccagggcttggcttccacagggcccttccagccagcctggttatttttagctgtaattaaaatcacaacatatggtgtcatggaccccatttctgctaactgatgtgcaagcagttttttttttaattattaaactgactgtaaaaactttttaatttgggggtatttagagtgttcaaggagaaagccactctaacattcatgccagatgacagctagtcaatgagaggaaaaaacaccccacgctagctccgtcgatctctctgctctagccgcactaaattacagaattaataggctcttagaaaagactgacacacagttactgtgagaaagacaattaaatgtggaaacccacttttctcaccgcatttaattttaacaggaggctttgagactcaataaatctcttttctatttcttctccgctttcccataagttcttcagagaagcaccgagaacgtttaagaggcttctccctcttgatcatctctaactactcgttaagataatgtttccttccagaaactttctttggagatcaaggagaattagaaataccaatatatttcagaagctttttagatggccttcctcttcctgccttgacctttttggtctaggtcagattcattcatttgttcattcatcattcatttcttttttttttgagatggaatcttgctctgtcgccaggctggagtgcaatgatgcgatcttggctcaccgctacctccgcctccctggttcaagagattctcctgcctcagcctcccgagtagctgggattacaggcatgcaccaccatacctggctaattttgtatttttagtagagacggggtttccc[143 bp omitted]tattgctttctctaggggctaagctaaagggattggtggggctgctcttgctgtggttaagttcagtctaaaagagatataagcaggtgattaggtacctggagtgagacagagggagctggaggcacccagaggaagagtcagttgacacacacaggtgccctccgccctccctgcgcccacaccatccagcaccatggcttctgcccgcaggtgtccggtgctcacctggcatgaaatatgcacttgctaagtgggtccctaattgactcaacttgttaacctcttagtcaagtcctaccaaggttatgcttccaactcaaatcaggctgctctctgtcccacatgctctcgtgattaattgcaaagaaaaatcctttctgaagagaaggggaagaatttttttttttttttttttttggttaagatcctgctcttctcccagcctcagctgttcagcagtcaagtatttgtcatatttgagtcctttaaccactagtcatttctgactaatacccagtaggcagacatggggtaagatttccaagatgataaatgcttcccttcttatcttttgatatctggaagtagaaaatttcaaggaaaaagggttttacaccaagacgaccataaatctcattgtgttcacaacagaaggctgaccagaggagtttattaaatccgtaaaggatttgatgtatatcaaactgttacataaagtcaatactttggcgagaaatggacaataaatactcagcaagaggcaatatttctatcagggagaaggcaatcgcataaagattaggggagcaatttcaatattgcgtgtctctccgcagtgagacaggtcttgttttccagaatgatcacgggggaaagagtaaaggtggggcaggcagccttctgggctcagctaatcccaccatcaagctcagacgaggagttatggactgaaccttttggtcccctccccaaattcatacattgaagctctaactcccagtgtggctgtttatggagatgggacctctaaagaagtaattaaggctaaaggagatataagggaggggtcctgatctggtaggattagtgtccttataagaagagacactggaggtcaggtgtggtggctcacgtctgtaatcccagcactttgggaggctgagggggggtggatcaagaggtcaggagatcgagaccattctggccaacacggtgaaaccccatctctactaaaaatacaaaaattagctgggcatggtggcaggcacctgtagtcccagctacttgggaggctgaggcaggagaatggcatgaaccccggaggcagagcttgcagtgagcccatatcgcaccactgcattccagactccagcctgggtgacagagactccgtctcttaaaaaaaaaaaaaaaaaaaaaaagagagagagagactctgatgaactctccctatcactcacctgcacaaaggggccatggaagccacagtgattcggcagtgatctgcaagccaggaagagaggccttattagacacccactggccgggcacggtggcctgtaatcccaacactttgggaggccgaagtgggtcgatcacctgaggtcaggagttcaagaccagcctgggcaacatagtgaaagcccagctctactaaaaatgcaaaaattagctgggcacggtggcgtgtgcctataatcctggctattcagaaggctgaggcaggagaatcgcttgaaccctgggaggcagaggttgcagtgagccgagattatactattgcactccagcctgggcaacagagcaagactccgtcacaaacaaacaaacaaccaccatgctggcagcctgatcttagagcttcagcctccagaactgtgagtagaccaatgcaatggcccgtctcctcttgggaaggctgatctcactttgaaattgcaagatggccaccttcctcagcatctaaaggccacagtgcagacaggaaacccaaatcatattgctgtctaaataatcgcagcttctacacttaatctatgtgcttttcagatatcgtctcatttaagtagcagcttcttgagggaatcctcacatcaatctttaaaataaatagtgatgatgccccgattttccatctggaaactgcaaagctcagagatactaacttactcaggaccacacggatgattattgggagggtcaagatggaatccagtttcggtggtttccaggatggtcaaaggaccattccgctattctgcatcttgaagtcatcctctttccagtgagacggttaaggcttggagttatgtctacaaagaccaatcatctagaagaggaagggaaagtttagttaatgctctagataagttatctatacaacactaagcatctgaatagtttgattcatccacatattccactgtctgacccagatgttccccagcagggctgaatgctctttgaaaggatagaccatttctcttcctttccttcctccttttaatgagcacagccccttccttccaccatatgtgtggaaaataaatgaaggaagtggtgtctgagtgagcacagcgatggtgtgaatattgagaggccactgcggagagagtgagcacttgtcctctgggagtggccacttctcatcgcttttgtgtgtcatgctttgtctttccaacagatctatgggcagttgagagtggggccgtggctttgcatcccgcggccccttcccctgtgctgaagatgctctgtgcggggtgtgctcttggtgagggagtcccctcttccccgtaccccctcctaggcatggctcggggggacccacaattggaatgcagggtcctttcagtcttaggaattctttggtgcttccaggtctcatttggggagcagatattgttgtcaaagttggggggccaggctgagggccccacacactcacagctatttctccctggaatcttggtacccccacccaggtcagtgtcaggtagctgagcccaggaatccactgttctaggaccacagacctctcttcttccttcacctctggtggagctttctctctaactggtgtgagaaaccccatagtccccatttttcctaaacactcattgccagcaaatcccaccttcttccttcttctgttccatctgtgagtcctcaaagtcctccactgggcttaggaaaaacccaaaaccagaaaggcacataggtctttctgctttttgctgtgacataaacctccctgaaggttctgtgccctgagctggtttcctgctagaataggaaggaaattagaaaatacaggaaggaaaaaaaaaatcaaagcatgtattcacaggcacatgactgcagaatattgtaaggctgatttttttcctctgtattttctaattgtgagtgtgaagagtgtggggagtgtgcacatgggtctgtatgtgtgtgtgtgtgtatggtcacttcttgtttgtccttgaattcctccatcttcctactcctctgcaccagctcagcctcaggagccccaggaccagccccctagtctgctgatgggaccagtgagtggaagccactagaagtggaagggggaagtaggctcctgcttggcacctgctctctgcactgctgttcatgggggtgccccgacttgatgccatcatctgaccttctgggatacttcctcatgcccctgccttaatgcaatttctgtttccaggagcaataattcaaaatgacagtggggactttcggctgaccgcagggcagcctcacggccagagtgggtagtgaggactctgactgcaaggtgtcagaggttctaagccatctgtatggtgacagccacatgcctctctggaggccaggatggaggctgcagcagaccctccagccacaggagctcttaagacacacattcccaggatcctccagatctgtcaggatgctggaatcagatgaacagttttccaggtgacttcataagtcctctgatttagagctactgtatgggggcagttgtcagccttacccatggtctgcagcactgaggcttgcctcggccaccctggtcaccaccttgacccattggttaaggtgatcacttgtcactttgaccagccacttgctgctgcagtgggcctgacctggccagctcctctcctgcctgcaatcctgtggggccaggcctggaacatacttcttttaggccttgtccttcctgctacctaaaggtagaagttcttgggctctctcccctctaacatgaaatactcattcctggaagcccacccagagtgactaggagcccagggaagacttcctgtgatggattgggacaggaaaccccggctgtctctatggaggaccagcaggagcagcagctgcgtcagccccaggcttggatccagaaccctgtcagtgacaagatccatcacccagatgatctctctaatggagggaggaaatgaatgggccacttaccaccctgagtttggaatacagtagagtgaacgccgttaactctgggggtatgtgtcttgaaaatccagggtgtgcgattcctcttgccagagacctccccagacccccgaggccagggtcagccctgggtgacagccagctggcccccaccttcccttcctctcctgttaaccttgactcccctcatccagaaggatctcagagagagggagggccctgtccagagccatcttctagcagtgggggtgctgatcctcaggccctggttctttctctctcttccctgctcatgtgaatcaaggatttggcccagtctctctgtgagcccccaatgggtctggccaggctcttccaaaagttgtctttttttcttcccaggagcaggagttgactgtccacaggggcaccagctggaggcaggaatggactggcctccgcctcggttatcccacctcctgattcgcctctgattgctgagtttgggttctgttgtcagttagggccctctctcctgaaacccctgaaatcctggagggccttctaccacctggccgtgtaaaaagcacaagggggttaatggagaatgaccaaaaggaccacaccacgaaagggggccgagcctgggcatgactgagcggggagcacagaggactcctctcatgtgacgcccaaccccagataagccatgtgcccattgcgtgtactggtaaactaaggttcattcatgccaccagcaggtacaggttgagtattcccaatccaaaaatccaaaatctgaaatgttccggatgtgcccaggcggaggtctgtctgatcttccctggctgcccttcccttttccccaccctgcctcgccggttccctctggggtcctgtaccatctccctccacaccatcactgttagaatgttaacctcaaaagcaaaaccttgtacaaatgctaccatattctacaaatcatataaaaatattttagcctatgttttcaaataggtacttgtacatgcaaattctaagactatacaaagggtcagagtggaaagtaccattcccagcacagtctccctgctaccttaaggcacaccctgtccacagcttcacgtgttgacttccaaaggggtttctatagattcataatatcaagccctgtataatttccactattggagaggttttgacctaaaaaaaaaataaccagtaatctcatgtggattgacctaatttaagcatattcttataaacttgaatcataattatgtgaataacagattttagtaccaattgcagaaataattattcatctctctcattagggatctggctagggaaactgtttgctttccagtttattcccatccctcctctgttttatttttcctccctcacaggtggggtggggttggatggtccctgcaaaccaggttttccatgctcccttgacaactggcttccatttggatatggccattagtcacccctcaccaatgacaggtgggacactggggatggggaggagggggaaggcagggtatcccctgcatccatcccatccctggagcatctttggccatggctgcacctcctctgaggctcagctcccaccaggcagcttgagcagctgttctagcccccaggggctccccacttgcaaggttccttcaaggttttggctcctgctggggatcctggctcccaagatttggaaatgacatcttccttccatgaccctccaacctggggtggtagacgttccctagttgcccatctttgggcttcctcacctacgtttgccttttcagcttttctaacacctctgttactggttccttgttttaaattcctcttagtaagaattctgttttctttactggcccttaactgacacactctattactgctcagaatctatactgcacttctcaaaagaatggcatctggtctttaagcctgaaatccttggcttccttgctcgctctcactcacccaagaaatcaccaagtcctgtaattctatctctgagtatcttttgaacctgcacccttctctcctccccaaatcccctaccttagttcaagcctcacgtcctccctccagcccagcctcacggcttccagtcttggctcctcgtcattcactttctactcgatggccagagggagcattctaacatgaaatcttttcatgccactctctggcttcaaacatatccacagcttccatgtccttctgatgacatccgaagtcctctccatgctgtggtcctgcttgcccctcagatctaatctcatgcctctcttcttttgccaccctctgcctgatgagagccagacataaaaaaaaaaaaagtttcctgtttgcatctgctatcttttgctccccgcccccccccacccgcctttttttttttttttttttgagatggagtctcgccctatcacccaggctggagtgcagtggcgcgatctcagcgcactgcaacttctgcctcccggttcaagcgattctcctgcctcagcctccagagtagctgggattataggtgcccaccaccacgccgagctaacgtttgcatttttagtacagatggggtttcaccatgttgatcaggctggtctcaaactcctgacctcaagtgatctgcctgcctcagcctcccaaagtactgggattacaggtgtgagcctccacacccagcctctttgggccttttaatggagcacttttatccccctccccttctaccttatcatctgcctaatctcactcatcctttatgtttcatcttgggtgccacttcctccaggaagccttccaggatctgccaagattgagttgggggcctttcctttatatgctacagcatcccgtactcccctgatgatctcattgcttctattcttatcactcttccttctagactataagcttcatgagagtgggggctatgttggtatcatttacagtcaagtcctcccttcttcaccctgacacatgacaggagatcaaagggcttgactgtggggtccaattatttgtgagcctgcagatgcaggaaatgccaactcccttcattgtgtttggctgcaatgaacccctggcctgggtatggagagacatctcattccacttgattaaaaaatgtgacctgtgtgtgaggcttgggagggacccagagatgaatcgccctcagcccctgtcaaaggaagcactggcctggtttctgagggaaaccctctgtttggaagtgtaatcgggccatgcacagattcgggatgtactgaaacgaccttagcagtgagctcccagtcagttcagaagttggaacatgatgcttacgagggcagagtcacagggtcagtcccacctggacgagggccatgtcagccagcaaagctaacaaaacagcattctcttccagaccaagcctggccatggtcctagactgggttccagctgctgacatggcctgaattctccgagactcagattgcttattcctcctgcagcaccaccggctgtcagggcaagacgtctgcatggcctctgccaccaactgagcagacggggggttggagggaccagaaatgcacagagaggttcagggattcccccagagttaccaaaccagcactggaaccaggcgtgggcatcagtagaggtaagtcatgtgcccgttgcatggaccagcaagctgaggttaattactcaacaagcaagcccaggttgagtatccctaatctgaaaatacgaaatcagaaatgcttcaaaatctgaaactttttgaggcccccacgctagaagaattgctcattggagtgttttggagttcggacttccagataaggaagataagtgtaacgcaaatattccacttctggccccaagcatttcagacaggggacactcaaacaactgggccctcgctgtgattcaggctttgtgccacgtgccacctgcagataggatggttccgacggcccaggagctcagcatccggctggagcgtgggacagggaaataaatgatggttttaaaagggtcatgagaggaaagacatgactcagtatcttgatggtggtgttatatacatgaagctacacaggcgataacattgtacagaactcaatccatgcagacaaaatgagaagcaaaactagggaaatctgaataagttagggggactacaccaatgtcgatacgctaattgtgatattattgtttagttttgcgaaatgttataatgagcggaactggacaaagtgtgcaggcatctctctgtattatttcttacaactatatgtggatctacaattatctcaaaacattttttttttgagatggggtctcgctctgtcacccaggctggagggcaacagcacgatctcggctccctgcaacctctgcctcccaggttcaagcgattctcctgcctcagcctcctgagtagctgggattacaggagcatgccaccatgcctggctaattttgtatttttagtagagacagggtttcaccatgatggtcaggctggtcttgaactcctgacctcgtgatccacctgcctcggtctcccaaaatgttgggattacaggtgtgagccaccgagtctggcctcaaaacatttttttaaagaacaggtgtctctgctgaggccactctcacccttcagtgcgttaggaatgggccaccttcctccactcctcaatagagataggaaatcagctctcggccatgactttcagaaaggctagagtaacctcctttgcaaatttttcctgtacttcctgcagccagaagctgggggttccactaacgatgagccactgtagtaataagacacctgttgctgatgagaaacttgtcctgaacggtcccttggctgcctgggaggctgaaataaacagcaaacacgcattcgaagaaagcaaagcctttcatgaaagagaattgggtggaaagttgctttgctttcctagagtccttgggaaaaagatcctgacataattactcccaagtccgggataaatgaatacagaaagtgctttacagaacgcagtgagtctgatggattttattgatcggcttttccccgtgtttcctggggaaatactgcaccttcctcactgcggcttcctcactccggcccagtgacatagacacgattgttttcattacaggatggcatttcctttgaatgaaatatgaaatggggtgtattccgctctcacttcgggcagtgtggtgcctgggcttggacagacatttcattatttccaaacaaatatcaccttcaatcaaatattaattttgtatgaaaccagaatgatcactagtggtttttgtcaccaagtaaaagagcaatgaacggcccaggggtcattaatttcttcccagaaaagcaagtgtgtgtgtgtgtgtgtgtgtgtgtgtgtgtgtgtgtgtgtgtgtgcatgcacgcacgtgcgcgcatgtgtgtgtgtgatacagggaaccaagtgagaaagtcagactggaatcgctttcatctttatattctgacccctgatgcttctgttcttgtttcccaggtgggatcacaacctttgtgagtttcttcttgtttctggaggtaaacagacatgtactgtggtgcagggccggagtgggagtctggccaccctggcaggctctttagcaaagggcagagtggcctgggaggcagcacacctttgccccgctctaaacagctctaaacagacctgctgtgcatccccagcacatactgggcctgtctgaatctccgtgtcttcagaggtgatggggatgcagcctacatgatctctagagtcttctggctcctgtgttctatgacattcactacagcttggggaatttccccatatatagtctcctttatgaaacccatcagggatgaggagtggccccagctatagaaaactgcaggaaaggcctcggccccatgagggcttctgacccgttcccaatcatccctttcatgctatttctgcttccttttgggtttcttccgccttcttccaacctccttgttatcagagaactgcagctctgacctcggcttgaatacctccagtgaaggggcgctccccaccttccaggcagcccaggctattaggtattggaaagtattactcttgtagtctttccttatgctgaacaaagagagagacatttccctatccgtcttctttctgctccctggtagtacacggagtaaggctaatttttcctgcaaatgacagtcaagtgctgaagaatggtaatcaagacccccttagtctgctcctctccagaattagtactcccagatcctgaatcatttatggcatgtagtcatgagtctttatcattctgatttagttcttcttcttttttttttttttttttttttgagatggaatctcgctcttgttgcccaggttggagtgcaatggtgtgatctcagctcaccacaaccttcgcctcccgggttcaagcaattctcctgcctcagcctcccaagtagctgggattacaggcatgcaccactatgcccggctaattttgtatttttagtagagacagggtttctccatgt[137 bp omitted]ccttcttatatatataaaaatcaatcataaagctaatataattatagaaaaattagttactcggggaaaaagttgtcaaaatttccatttttaacccacttactatgcatattttggtacattcttttctgtctttttctccatatgttttttacagttttgaactgtaaatttgaatactttttacccctttctgcagtaaatgtcgtgtcaaaattgttttccgtgttccctcatagtgtttacttttactcttcaatctatcaatgcatttatgataatttgtttaagcttatactgttcagcactgagattgtttctacttttatgctattatagccgatgctgtgatgacatttttgggtgtggcttctttgagaaagaggtcaatgagatgcatcctggggtcagaaggtgtgaatatctacagttgctacatattgcccgttgctttctaggagggctactagacgtccacggtaggaaaggacctttctcacagctcggtggccagcagccagtgcctgggctgagctacggcaggatgctcccagggtgggctgggcagtgctggatgaacagggagggtcagctcactgaggctgggtcctgggtgtctactgatggagacagcaaaaggtaatgggtaagagtgggcttactcatagaacctggaaggtctaggtggaacccccatccttccgcttacctgctttgtgaccttggggaatttagtgagacttgctttcctcttctgtaaaatgtggagagaacttacttaatacctgctcttatcatgttcaccaatggcctttgtgttagtttcttagggctgctgaaacaaattaccatgaatttggtgatttcacagaaatttattctctcatagttcccgaggccagaagtctgaaacagtatcactgggccaaaatcaaagtgttggcaggctgccctcccaccagaagctctagtggagaatccattccttgcctcttctagcttttggtggctgccggcactccctggcttgtatccttccagccttcctccgtggccacacagccttctccttggtgttcattgaatctccctctgcccccgtcttataaggacacttgtcactggatttaggacccaaccagataacccaggatccttctcaaagtcattaatcgaatcacgtttgcaaaacctccttttccaaatcaggtaacatttacaggttccaaaaagtagaatgtatatctttgggggccattttaacctgctgtatcgtctatattgttatgtctctaaacatttcctgcctcaggactcggtccttgggcctcttatctttgttacttcctcccttagggacctcactgggtggcaaggacctttccctttctggtaatgatcctcactcagtcacatgactttaaatcatcttgcatgctggcgactccagcccagttctctgaactccatgtgtccccctgacatcttcactgaccatccaataggcaacttgaatgtaggacatccaagcctgagccccagatgttctcccctatcctgttcttcctgctgccttccctaccttgaaggatggaagtctgtccttgcagtggctcacaggaaagcctgagcaccagcttccacccctgtttctcgccctacaccccaactcatcagcaagtcctgtggctgatagatccagattctgaccaatttccatcaccccactgccaccaccccactctgaaccaggatgacctctttcctggatgagtgaagagtctctaaatggactttctgcatccgtccaggtcattctttggtttcttcccaacacagcagatggagtgagcctcaggttaaaatctaagtaaaatcccatcactcctcactggccctcccctcccctcccctcccctgccttcccttcccttcccttcccttcccttcctctcccttcccatcctcccctcccctcccgtcccctccccgccttcccttccctttttttgagatggagttttgctcttgttgcccaggctggagtgtaatggggcgatctcagctcactgcaacctccacctcccgagttcaagggattctcctgcctcagcctcccgagtagctgggattacaggcacgcaccaccgtgcctggctaattttttgtatttttagtagagatggggtttcaccatgttggccaggctggtctcgaactcctgacctcaggtgatccacccacctcagccttccaaagtgctgggattacagaggtgagccaccacgcccggcccctcctccttggtttcttaaccttattcagaatagaagccaaagttcttgtgataacttcaaagaaccccccctcccccaacccgcctccatctcctcctgcttctgcctctggcacttctctccaggcatcctgcctccttgctcctctgtcatcatgcctgacacaagcctgcctcagggcttttgcccttgctgttccttctgcctagaactctctgccctcaccccctcactcttctttaggcattgctcaaatgtcaccctcgcagagaggtctttcctctctatcatatttcagagggctatgcccgcccctgtatcctccaacccacacttaacaccactttacatgttactcattcattttgtttttcgtctgcctgctgtgactagaatataagctccagtagggaagagcctttgtctcctttgtttactgctcacccctccccatgtgttttgcagtgttcagttgtgactttgaatattgctttccttctccatttaacgtcatgtccaaatgttcacgtttcttcatagtctttataaccatgcttcgtaaaggatgtgggctcttaataaatatttattgaatgagcgagtgaatgaatgaatcagggttctgagatgatgaaacaagatgtgcatgtgaagttcgtggctcagcatctagcacagagcaagcattcaagaggggttagttatcaccatcaccatcaatgttattaagattccattaagtctttgggcaaacataatctgaaaattctttgcacgcacctgcaaccccaccccaccccgcccaaggcttcttctcagccttgttctgctagttgcctttttttttttttttttttttttttttttgagatgcagtctcgctctgtcacccaggctggagtgcagtggcgtgatcttggcttactgcaacttccgcttcccaggttcaagtgattctcctgcctcagcctcctgagtagctgggaacacaggtgcccgccaccacacccggctaatttttatatttttattagagacggggtttcaccatgttggccaggctggtcttgaactcctgacctcatgatccaccccctttggcctcccaaagtgctgggattacaggtgtgagccaccatgcctggcctggtagctgcctattcttgtgcggctgagtttcaggccccagcatgggaatttgcatttcccatgtgtgtttctccttgctgggagcagcctttcatctcacctcttgaagccctttggaatctggattctgtttcacttctttgtgtttcagaacacacaaagctctgcaaaaatctttcctagcttcctagccggcttcctcatttgatctctataacactcttcattttgcaaaagaagaaactgaagctgaaggaagttaacttaatctcctcattcatccttttatttaagaagtaactattgagtgctgcgctaggtggtaaggacgccagggaatgggtccagcagtactgcgggacagtatgtcctgcaaggattgacctcaggcgggtgggtgtttctccagcatgagcttttgctctcttatcccagccactggcccgtccatcctgggaggtccttcagggagacatgggactgtgccctcagagtcatgggcccgcttggtgccaaagggttccctctgcatcttcacttgctggacagtggcagagaaaagatgcttgtcctgtatcctttgggtgggctccatgagggaccaatactccactggactgtaagctccacagaggcagggacctttctgtcttgtgcaaactgcctgatccctccctgcatggcccagtgtatgctctggagtgggtgctcagtaagtatttcttggttcaatcatgagatgcctatcatagaagagaaagctcccaaacaatgttgagaaccggggaacattatgatggggggcccacggcttgaacagagccactgcatacctccagctccttagcctctgggtgctgtttcctctgcaatgtgaactgcaaggcccacactgctttgcccttcctgcccggcttccaagctcttgggcattctcaaggcaacgttaaagtaagctgcgtacatactaaggctaaggcacctagatctccaggaaagaggcctcttgacagagggggttcggatggcataagatggttgttctagttacaaagcccaggctgggaaaattttaagacgagactctagactcagcatggcctccaactcactctgtaactgtgggtctagtctcccatctatagaataaatggggacagatgtgatggctcacacttgtaatctcagtactttgggaagccaaggcagaaggatcccttgagtccaggagtttgaagctgcagtgagctatgatcacgccactgcactccagcctgggtgacagagcaagatcttgtttctcttaaaaaaaaaaaattaattaattaaaaaaaacaataaagggattatttagggcttaggcttactaaagctctgatccctatagctatatggatcagccagtctcttgaaacaactgatttctgtcactcccagatggctggagaacaggtcttctctatggcaagctacagacatatcagaccagttttgctgtgggccaggaaactgcagcctccctagaagctattttttcctgccgctagaaagccaggatggtgatggcccctcagactggaccccagggaaggttgtccttccataaccattgcataattccataattccacacttgttcaaggtggctttttttttttttttttttttttgatagtgttttgctcttgttgcccaggctggagtgtaatggtgcgatctcagctcactgcaacctccgcctcccgggttcaagcgactcttctgcctcagcctcccaagtagctgggattacaggcatgttctaccacgtctggctaattttgtattttagtaaagatgggatttctccatgttggtcaggttggtctcgaactcccgacctcaggtgatctgcttgcctcggcctcccaaaatgctgggattgcaggcatgagccaccacgtccggctaattttgtatttttagtagagacgggatttctccatgttggt[133 bp omitted]tccttgaacttaaaaaaagttttgttttgaaataattatagattcacaggaagttgcaaagaaatgcaccatgcacccttcacttcttcttccccaatgttagcatcttgcatgatgttcgcatgatatcaacaccatgaagatatgtgtgacgattttctcatcttttagagcagaagtaggcgaatgatggctcatgggccagatttgacttgccacctgttcttttttaaaaccacctgtttttgtaaataaatttctattggagcacaggcctcctcattcatttacgtgttttctatgactgttttcatactaccatagcacaagtgagcagttgtgacagagaccatatggcctccaaagcctaaaattgttactatctagccccttatagaaaaagtttggagacctctgttttacagtaagacaccgagacagctaagataccgggattaaatatcactcataaaattataaagacggctgggcacagtggctcatgcttgtaatcccagcactttgggaggtggaggcaggcggatcacgaggtcaggagttcgagaccagcctggccaacacagtgaaaccccatctctactaaaaatacaaaaattagcagggtgtggtggcgggtgcctgtaatcccagctacttgggaggctgaggcaggagaatcgcttgaatccaggaggcggatgttgcagtgaggcgagatcacaccactgtactccagcctgggtgagagagcgaaactctatcttaaaaaaaaaaattgtaaagacaactattaggagactagaatagacttaatgcactttctaatccataagaaggaaaccatacagtcaaatacgataacccatgtagggaatgagcaccaagaaagatttaaagcaacacaaatgaggatacaataaaaccaaatatgtctattactcatataaaacaaatgagacaaattcagttgttaaaataagcctcagatttggttaagcaaacaaattaactataagttgtatacaagagatgagttaaaaataaagtgatgcaggccaggcgtggtggctcatgccttgtaatcacagcactttaggagactgagacaggcagatcactggaggtcaggagttcgagaccagcctggccaacatggtggaaccttgtctctactaaaaatacaaaaattagccaggcatggtggtgcatgcctgtaatcctagctactcaggaggctgtggcaggagaattgcctgaacctgggaggcagagattgcagtaagccaagatagcaccactgcactctagcctgggtgacagagtgagactccgatgcaaagattaggagttaaagggagggacttgtggttaaattactagacattatcttatcttcctccagggatccaataaaatggtaggtaaaaaaaaaagtgtagctgatgatgtcaaagacagtgggtggaagtctaacagccgagaggaggcttcaatacatttcttgcaattagaagggtgtattggcagtgcagtggtcattggcaatgcagggaagggtagagctagagtggaggggatacaggtgaaggagatgcccatctgccttctagaaccaagagagactttagaccctgaagcccttggtgaactgaatgagagatctcctctttctaccctttgtaggtcttcagtgttttggccatctccctacctgatcaccctgaagcaacacccacaagcagacaagctctgcccaggtattcacagcttctcacaactttcctttttctccttctgtgaaaacaactaaacagggccttatcaaatatttgaggaaagcctctgtatgagttatgctgagcaatacattagcccccacacttagcagcttaaaacaacaagcatttctgatctcacagtttctgtgggtcagacattgagaacggcttagccaggtggttctggttcaagatctcttatgaggtgcacgtctgaagacaggaggatccacttccaagatgactcactcacatgactataggcaaagaggtcttagatccttgctggctgttggcaggaggcttcagtttctcactacatggacctctccacagggctgcttgagtgtcctcatgataggcggctggattcccccagactgagtgatctaagacagagagagcaaggaggaaactttttacaacccggtcttggatgctgcataccatcatttccagtttcttccattcattagaaacaaatcactaagtccagcccatgctctgtggaggagaattgggcttcacctcttgagaggaagagaatcgaaggatttgtgaacatatttgaaaactacccaacctgtaacaggaaaaaagaagataaaaataaataaatatctaaaaataattctaaaatgaagtagtacaagcagcaaaagagaataaaaaagtttaatgggtgtcttcagaggtatttgagaggatactatattcattaaaaaaaccacaaaatcaatgccatggaaaataaaattaagagaatgagaaagagaccttggacattacagcatgattactgatttctttttttctccttcacttgcttttatgaaacatttattttactttcttattaaagtggaatttttattaaaagaagttaaccatttaaggcatttagttgtgcaaccatcacttctctcttgttccaaaacaaaactccaaaagagaccctgtatccactaagcagctactccccatttctccccaacccatgacaacccctggtctactttctatctctatgaatttgcctattctggacatctcatatagatggaatcatataaggtatgactttttgtgtctggcttcttttgtttggcaaaaagtatttaattgtgggtttctgtttttcaaattaagagaaggattggaggctaaatcagaagaaatctccaagaaaggagaacataaaggaagaatgaggaaaatatgagtgaatagcaatgctaggagatcactccagggggtccaatatctgatagaagttctagaatgagcagagaaaaatggagaagagaaacttatgaaagaaataatacaagaaaagtccccattaataagggatacatatacacaaagaaccagcatactgaatggcaaaagactcacattaacacaaactattgtgacatttcatgtcatgaggagttgagaggtgatattaaagatttctagatgggaggggaaaataaagagcagcaaagaaaaatgtaagagaatcagaatgtgtaattctttttctcacacactatccttagaacctaacccctttgtaaattatgactccaatgtctaatttatgtcatctgacttcaatacaataaaacctaaaagcaacatcaagacaatagcaacccttgcaaatcaatgacctagaaactaaagaaaaactttcttatattaacttctgggttaaagaataaatgaacctgaaaatgaagaatctctgaaagataagaatatatgagaatgaaaatactatgtattgatgcttagaaatatagcttggagagaaattttactcttaaaatgcttaagacatcaatcacgtgtagccagtaaccagcatgttaaaaactaggacctatttaattagaaaacgtctttatatttgactgtccttttaattagcttggttgggttgttcttcccttgacacccaatgaatgtatgagcatactcattacttttctgataactctcaggtagttaaaaaatttgatatcatcactttggagcacaaacatacttttaagtgagtaagagtgtttctgacatctcccttcccacgcccacttcctactcattttggtttcaagctgagggaaaggaggagaaagaacgtggtacagaaaactctttctggactagaactcccctaaggtggcttcccaagttttgtacctgaaatgtggttaaagttaactctttcttagagcacctgcctggttcctttggcaatttctctactgggcccctgccagtcttgtttctggggcacagccttgtctttgcctggcctcctgaggacccctcagcttcagtgcccatgggatgggagtgctgtggcttcctagtggcagacttctacctcgttgccgcaggctgtgttagctttctcaggggtgggtcaggcaccagttctctgtgctcccaactgtacagaacccacacactttcttctaaccatctctgtagcttggggtcaggagattgcattgttcatgccacccttcagagtagggtctgacttaaagcatagctctctacaaataaatgctcctccaaaatgtattctaaggctcatcattcaatcctgttgtatccttatcgtggtcattcacctaactagttctaggctacctccgttaaatattcagcatggtctccatctctcatcttactttggtgtctgagaactagaatattttgtatcttattttatattttatttttttttaacgttttgtagagatggagtctcactgtgttgcgcaggctggtctcaaactcctgtccttaagctatcctcctgaaagtgttaggattacaggcatgagccaccatgcctggccttagaatctcttgtttattcaatcaaatcttgcaatattacagagcacattacacaagaaaaaaataaaacaaatgaattaaacatccaatatgaaaagttagagatcaactgaatcaatgcaaaaaaattagaaaaaagtattgatgaatttataaaataaaaatggtagagctaataaatcaagaatgaatttatttgagataaataaattcaataagtttatgagggaaaatacaataaaattgagaaataattaggagacggttcaaatccactgcattagaaacaaacaagagaaaacaccacagatccaaaagaaattgaataggacagaaaaacttaacaaaaaatttagtcaaagtaaatttgaaaaaatgcgcgagatagatattttctaggaactataaatgactaaaatcagccccataagaggtagaaagcctaaatagagcaaaaacaatggaagaaattgagaaagttataaaaaagctacctctccacaaaagtgccagatccagatggtctcaaaggtaaattcttacaaaagttcaagtaacagatgattctgatactatttaaacccttccagaacctagagaagtaaggatgtcttccaaatctttttataaaaccagcatgccaaaatttgacaaagttagcacaaaaacacaaaacttcagaccaatgtcacaaccaccataaagaacaatttaaacaaaacgatggtagaaatttccatagcatattaaaggaataaaacaccacattcaaggggattcttcctccaaatttaaggcctttcaaaattatgtaatctattaatatagtacatttttttaatgtatcacagggggaaaacaccagaggatcaactcaatggatgccaaaaaggaattttaattgaattcaatattcaccactaatttaacacaaaccaatgaactaacctacgtaatgggaatagatggtgtgcttcccactgtcatccttccctcccccattgcaagtatataaaggtttgggttgaaacgaccttcaccgcttctctaagccccaagttggttagtggagttccactgccacagtgagtagttaaggatggacaatagctaagcaagatattttcttgcttagtgattggtataaacaatcactaggattgttataaacaaagagtcctaggatgttctaatcagagtaaataccaggacttttgttttttttttttgccttcaaagctttgaagaagagaagccttatttttctctgggttatatggtgtgcaaatgttaggtctggaacagggcagccattattgttttctaagaggaaagccagctagacaacagagccagcatgcagaagaggctggagctcggagaatcacagggacatgaaactggagccccaatcaagctgcacctgaaacttaactaccactgggctatttttatgcaagctaataaatcatctttattttgtaagccagtttgagttggttttctattacgtgcaactaaaaacagtctaactgattcagactgatattttcttagcaccatttaaaaagtttagctgaaatcaaaaccatggtagaagatgagatgcatcctcattaaattcagggcatgcaagatgagaacagcatctgcaaaggatggctggggaaaatcctagatttcttgagtctgaggtcaaagaggggtggaataaaggcgaagataaaagggctgatagccctggggactctgaaatgaagagaacagagaagacagatgccctgtggtgatttgctccaaagcagctcaaggggaggggagccagctgctttcccttagaacagtggtttttcaactccaagtgattttccctcccaagagacatttgggaatgtctagagacatttatggtttcacaacttggggtcagtgttattggcatctagtgggtagcagccaaggatgcttctaaatatccctcaatgtacaggacagcccccgacaataagaaattatctggcccaagatgtcagtcatgttgaggttgagaagcctcacctttatcctctcagttttgctggtttatgttcacagttccttccgtggcctcgtgggtaacctcactgtggagtttacattgttctcacagcacgagtcaatgagattagacaagagacaaaaatattgaaaaggaggaggtccagtgttgtgattcacaaataatggccatatacttgctgattctaagagctggctgagaaactgtcagccattgtagaaacaatggaagaattcagtgaggtggtggatttcaacattaatagtcgagaccaacagttttgctgtatgctaaaaatagctagttagaaaatatggaaaatataaaaaagtgtacaaaatgtaggtacacgtttagcctgagctgatcattacccttatgaagatcattaccccttttactctcttttgagaggcatacagaaaagactgcttcaaactctctggacctggctctagaaaggaatattcagcctgacagagatgagtgtgcttctcaaaattaactgagaaacgaaattctgataaaatttcacaggatttttcttcttttggaatctgttgaaataaaacctaagttcatctggacaaaaaaactataaaaaataactgagccaattctgagaagaaaactactgacatgggaccagcctgataagataccaaaacatctgaaactcagcaataaagcagtttaataatggagaagaaacacacaggtggatgaaagcaatagagattccagaaatagacccaagtacatggaagaatttcatttacagtaaaggtataattttctgaaacaattctctagccatctggtaaaatgaaagccttctcagccctcatgtctgaaacttatatgtccaacaaaggattcattttcagaatatataaataactcatacaaatcaatcagaaaaaagataatgaaaaaatgactataacactggaacagccacctcacaaataaggcaatccagatggccaataagcaatggaaaaggagcttgctctgattagtcaaggagctacaaatcaaaaccacagctgagatcctttactcatccaccagaacggctaaaagttaaggactgatgatataaattgttgttgaagatg[134 bp omitted]agcctcccgagtagttgggactacaggcgcccgccacctcgcacggctaattttttgtatttttagtagagacgggttttcactgtgcta[131 bp omitted]agacctgggccagcaacctttaatatgcaaataccagacattagaaaccgggtccacccaaacatggggattctgccatcttcttccttgccaccacatatgcctggcagcatggccacccccacatatccccacgtgtgtagaacatcatggagccctgcatttgcatattaaaaggctaaagtgggagggccagttttttcatgggctatgagaatgacatgcctgctcaaaccaatcccccgagccctgtgcaaatcagacacaacctcctccagcctcctcataaaactggctagtatccgcggcacatggggtctcctccctcggctttggagccccctccctctgtctctgcacaggggaacttcttccttctttcttctcccttctttcttgcctgttaaactctctgctccttaaaaccattccacatgcgtgggtgtcgttttttccaattcaactcaaaacgaagaaccttggtgttgctccactcatcagagctgtatcactgctttccaaaccatttggaacacaaaatttaaacaaaatgcacacacatgatgacacagaaagtccactgctagatgtatataaccaacttactcaaatgatacattaattttgttatatttggacaatggaatatacagccatggaatgaatgaacatatctgtatgaacatgaatgaatgatccagctatgaaaacaactatggatgaatgaacatggctgtatgaacatgaatgaatgatcccactatgaaaacaactatggatgaatgaacatggccgtatgaacatgaatgaacgagctatgaaaactactatggatgaatggacatggctgtatgaacatgaatgaaagatccagctatgaaaacagctatggataaatggacacggctatatgaacatgaatgaatgatccagctatgaaaacagctatgaatgaatggacatggccgtatgaaaatgaatgatccagctatgaaaacggctatgaatgaatggacctggctgtatgaacatgaatgaatgatccagctatgaaaatagctatgaatgaatgaactccagctacggacaacatacacaaccacatatgacaacacacatggcaagtgtgatgttgagcaaaagaatacatctggaatgattgtgtttacagaatgttaaagcacagacagagctaatcgatggggacagaggtcaggtgacctttggggagaaggaggtctgtgcctgggaggaagcatggctggggaggaggggggcttctgggttgctgacaatgttcttttattttccgatgtgggtatgttcccctagtgaaaatccattttatatttgggtgcttttctgtatggatgctattcatcaatagaaaatttaaaaagaaatacagaggctgggcacagtggctcacgcctataattccagcattttgggaggccgaggtaggcagatcacctgagatcaggagttcaagaccagcctggccaacatggtgaaacctcatctttactaaaaaataaaaaaattagctgggcgtggtggtggtgtgcgcctgtagtcccagctactagggaggctgaggtgggagaatctcttgaactcgggaggtggcagtgagctgagatggagctactgcactccagcctgggtgacagagtgagattccgtctcaaaaaaaaaaaaaaagaagaaaaaaaaaagaaatacagaaatatatagtatagtaaacaagcttatagtaaacaagcgaatggaagattctgtaccatgttgaaggccatttatgcagcgtcggtgattcccagtcttcccacctaatacatagagtgaataatgccaaacccgagtgggttttaggaaaattaaatgagacaatggatatggaagtgttttgtaatctgtaaaggctggcgtcgttacgagttttaccattaccccacgttcccactgctgagaagggcacacgtggaattatgatgacaagtggtgtccggggcccctgtgctctcttgttcagttgctctttatcatttaaatctgtcctggctttactctcttcaccacctccactgccccactcccaagatgaattctttccttaaacaatggaagatagatgggctttgtgtttcttgagctgattaaaatcatttcctctctgtgagagtccattcatgtggaaatggtgcttctgaacactagcctcagaatctagcctcgtgcactggaattgcagcctgcgatgtctaaccattcctgttccttcctggcagcatttcacagactccgcagatgcccctgcagagccttgaatgctttatatccgggcgccagctgagcccctctgaatgctgcctgagtgccgtgggtgcaattgcagtcgtgcgtcgtgccgagtgtggtgggcattcatcagctaccatcacggcaacagcagcttctgcttatcacgtgcgttgtctcagtgggtcctcacagcagaccggtggcagtagataacacaatccccattccacaggtgggaaagctgaactgcagatcagaggcaggaagtgcctgggccacagtcacagagtcacacattgcagagacaggatgtgaatgtgagtttgtttgactctagagcacatgctggttcatttattcaataaacgtttattaaacatctgctatgtgccaggcacttggataggttggtgaaaagtcttcctgcctcatgagcttacattctattggaggaggtggacaacaacggctaaacataatacataaataaatcatgtaatatactagaatgctaggagccttgggaaaaaaagagttggacagtgcaaaggggtatcaggagtggtgagaggttgggggcgggagtgtcttgacttgctagtgaagttggccaagggagacgtccttgagaaggtgacatttgacccgcccgcctcagcctcccaaagtggtgggattacaggcgtcagtcactgctcccagagttcaagaccagcctggccagcatggtgaaaccccatctctgctaaaaatataaaaattagccaggcgtggtggtgggtgcctgtaatcccagctactcaggaggctgaggcaggagaatcgcttgaacctgggaggtggaggttgtagtgagctgagatctcaccactgcactccagcctgggcaacagaacgagactctgtctcaaaaaaaaaaaagggacatttgaacaaagtcttgaggaaggcaagaggggttagctgtgtggatacctgggagaggagtgaaccagattgaaggaaaacttcacatccagtccctgcgtaggagaggctggcgtggccggcgcagggtaagggagggggcagtggcagtagcaagggtcagagaggtggctgagcgccaggtcccatagagtctcgaagtccattgtaaaggccttggctttctcgctgagtgaaatgggggtcctaggagggacagagcaaaggagcacactgccccatttgtgttccaaatgctgtgtggaggctggactatggtgcaggaaaggcgcatgcatggaggccagtaggaggcaagaggtgatggctgggactgcagaaattgaaatgtaacagtgagacatgcctgggtcacggacgtacttttatttatttatttgtttatttattttgagatggagtctcgctctgtcacccaggctggagtgcagtggtgcgatctcagctcactgcaacctccacctctcgggttcaagtaattctctggtctc[134 bp omitted]tggcctcccaaagtgctgggattacaggtgtgagccactgcatccagcattctggatgtactttgaagatagagttgatgagatttgctgagggagtctggggtctaagagaaagaaggagagagaagatgactctaggtttttggctggggcatctggaaggctggagatgaagaagggtgtgagaggaatgcgtttggggagtgggatgtcagcgcagttttggatctgctgggtgtgagatgattctcaggcctctgagtagagatgttaggtaggcagttggatgcaggaatgtggaatttgggagaagtctagtgtgaaaccttatttggattcaggttttctctgtaaataaaagggagagctgtaaagtcaggtgcttcccggggatcttgagggagcctgaagctgtggccctcggggagggggagagcctgatagtcctgacaacctgtgagctgggcctgaaacagtccctcccaagcacacacgctgtggcccaggaatcgtcggcaggtgccaggcctatgccggggctcctgcacccctgatggtcatggcaagtgtctcactcttcttatcaccagcccgctctcactcttatcctatttctgtcagctcctggtcctgactttgggacccaactgtggttctagcccctccttgagtccccacactgggtcccttggtcacctcttgtgtctttgggagaggcatgcttgacatccaactcatttgtctcttgacccaactgcagttggactaaggacagaggtacttcctcccatccccacactccaggagggcttgcgccagcttggccggctcagacgcagatgctgattggagagtccagtccgtgaaggcctaggtcaccagcctggccctgccagagatggctgggatactgaacatggccggtggaactggagaaatcaataggcatctagtgtctgactctccctggcagggagaaaggcatggagttacctcctttttcagagtggcttgctggtaagggttgggtggaggctggaggggatagagggagattgcaaatggtgaccaagtcagaagagaagcacatccacaatggagtgtccatgaaggtggcctgaagtgtcctctgtgtccaggggatctctagtgacattggtgggtgggtgggggttcttcgtctagaaggatgggacagagctgtgcactgaagcctgtggattctaatctcaaggccacagctgggatctgccatcctctttcagatgggctgtttttcttactttaattgtgaatataaacaaatatctatggaagctatgagatggaagataataagggaacagagtggggttgtcactgacacttccgccctctggcatgtgggattgtgaaatgctgggggacaaggacttctgggtttttacaatgtttacacctgtctcctccacaacaagaaatgggcttcacagaattgtccacattctcatccaggccctttggggtcggaagtagattcggggagtcaaaagggcagatacatgactgggattagggttcagttgtgcccagggtaagatgtcagccgaaggtcagaagcgggaataggggcaaagctcagtcaatgggtggctcaggttgcatcttggcctggggacaggctagggcttcatggggtcaggatcaggatgaatctacttccaggggacattcttgtcctatgtgtagctaagaggcctgctcctggattcagccagtctcctgcctcctttgttctgtctcctgattaacttttttttttttttttttctgagaaggagtctccctctgtcaccgaggctggagtgcagtggcaccatcttggctcactgcaagctctgcctcctgggttcatgccattctcccgcctcagcctcccaagtagctgggactacaggcgcctgccactatacccagctagttttgtttt[144 bp omitted]ctgagcaaaccaaacctgtcatgacttgagagcaagtgatccttcctactagatagagccttatccaacaggctccagcctcctggaggaaagctgggctctggcttgaaattaacctgctctggggtcctttccagtcccatgtggttctgcctgccctctttgtggccagcactgtgctgggcactttcatatgtgagctctctagatcttgagaacaattgcatgggggaaaggattagcatccccatttcatgtgcaaggaaaactgaggctcagttgctatttgtacccaggggcctatgtatccttctggctgtggagtcattttaccccttttgcttctggatgatgctcaatcccaccaggattccccaaaggacagagaagcaaacctgggtgatcaaggcgccatttcatcttttacctgagtgctcagagtcaggagtgatcaggcctgatcttgtctctgctcagcctgggccagccttaaagccctttcctcaaaggggattccgtattgagaaaagacatggcagagcaggttttctgctcctgcagaaagacctcaggcagatccctccaggcaagtttggaaaggggccagggagcaggctttcttggtctctggagggcagggagcaacccttcatcaaagcagccaaatcgttgtctctcggggcagtggcgcccagcaccctcccgaggctggccatgacagtgggctcctggggatgttggctgaaggcagggggcagtttgggttcatgtgctgagtccaatgtgtccgcctctgcagaacaaacaggggaggactgactgcctgtgcttccttctccttctgagcatcgtcttgcctcagtggctaggggaggggttgtgggctgcctgacccatgaccaggggttgggtgtgagaaggcaattagacacttttgcagcacaagtcaggctgcaggagggtcttgccctcagggaattctccttgccgtctcctccctgagcgtggcctcctctgtctctcaagtttccaggcccctcccccttttgaaacccatgcctcatctttcacccaaagacccacaccttgcttggctgaacctactatacttccctgtgggcaggaggcaggcagggagctgggtcttgcacactgggtcttgtacagaaccaagaggccattcgttgttgctggctttgccactgactagcagcccctgtcagggactgacgaatgaacgtgggcaccctgggtgacagagatggatggagatccctgcacacggccctgcacgcacggccggtctgtgtattcctccccttgggatcaggcgaatcagatggctgctgatggagccattactcagtcatttagttgtgctgggagggggaatgtgagtttcaccactaggacaattaggacccctccctaggggctgcagtattaggtggaggagtgtggggtggacagatgagtcccactagggggtgatgaggataacagcccgttggctccaatcagatcggaggcacacctgttcctccccagggctgggcttgggcagacaccactcacagccagccctactgtggttaggcgtgaagccagacctcacgtgaggtccatttgggctttctgagctctggtgcaccagccacagagaaagagagcctggatgctctcttggcagcctgctgcctttgttttaaactaaaaaatctgcgtcaagcgcagcgcttggtatgcagacaattccctgggaagagattcttttacgtttgtgcagtaatatattctccatcccggggcctgttattgtacaataaaacaagaaggctgggaatcaatgcagaaatgtgaaaaaaatgctctgaatcattttcataaccagcaaatgtggttttcagctgagaaacattttctttcctattctgaaatggtgggagcaattttcaggcctgggtactgggattgaaactctttgctgcttaaaggtaaatatcacccagaggagagaccacaccatactgggccgcgatgagctgaacttggctataataatcacagtacgcacttcaaaagcatctatcatgtgccagctctgtgctgggcactttcatatttgaaaggtgatatgtttggacaagtcaaaacagggttcttctgctccagccccccatcatggaggaattctctccacagcactccccacaatggacctagaggctttccttaagtgcttgcagtgagagtaactccctaactctaaaaagctcatgctattttctgttaatagctccaagtattaaaaaatgcttctgacttcttgtctcagtggagtgggcacgtgctgaagtctccctgctcagcttcaatcacatgcaaataatacaaacatagatgtcatgcaagtacaaatatcattttgtcttgtttctgataggactggccatattaaaaaaacagaataatttctataggccagaaatgaaacagagatactgatgtgtgggagttgaaactctgagatccacagtgtaccaagactggaaacagcctgtgagccaggaattcactcacacatcaatgggaaaatgtgacttctagtcaaggaaaaaacccaccaatagaaacttaccctgagatgacccaggtcttagatttagccaggcaaaggctttaaagcagctttataaatatgttcaaaggcttaaaggaaaatagtcttaatgactcaatagggaatctcagcagagaatggaacaaaatggaaactctagaattgaacactataataatttaaaatttaaaaaaatgcactggatgggcttcgtagtagattagaggggacagagaatgaataagtaaatttgaagatgggtcactagaaatgatccaatcacaggagagcagacagagaaaagattgaagaaaatgaacaaagcttcagaaatttatgagataaggtcaaatagtctgacatacatgcaatagaagttgcagaaggagaatatgggtctgaaataatagattatatatgtcagaatattatatatataatataggtcagaataatgagtgaaaatgggtcagaaataatatttaaagaaataaatagatgaaaattggataaaataaatatagacttacagttacaaaaagttcagagaatttcaagaaagataaattcatacccacccatatcatactcaacctgctgaaaataaagacaaaatcttgaagggagccagaggaaaaaaaagacacattttatataggataacaatgataaggactaccactgatttctcagaaacagtggaggctgaaaaacaaaggaataacatatttgaagtgattaaagaggaaaaaaaaatcctgttagccttgagagttttactgtttgtattcagtaaaaacatacttcaaaaatgaaggtgaaatagagtcattttcagacaaatagaagctaagagaatgtgttggcagcagacctgcacagcaagaactgccaaaggatgttctccaggttgaagaggaatgcaacctgatggaaacctgcgtccccaggaaggaaagagcaaaactgcttttctattgtattttttaaaaaagacaattgacagtttaaatgaataataataataatacaaaccatgatttaaaacatctgtggaaagcaaaagataggcaacaatagcagaaagaatggagggtgttcatataatgatataattataccattgtaagattattttatttgtaaactgggaaatagtaaaggggacgtatgaaggatcctgtgggaagtgggaagtgaaacagagttgactgaggatgtgtatgatgagcccaagtgtatggtaaataactaataaaaggagctggagctaacaagccaatagagatgagaaaatgaaatattaagaaatacttgattaacctaaaggaagctggtgaaggggtaaatgaagagcaaagaacaacaggaaaaaatgaaaaacaaatgggcaacttaaatccagccacatcgataactacattaagtgtgaacagaagaaacaccaaggttgcaggatagcaaatcaaattttaaaaatccattgtaggctgggtgcgttggctccctcctgtaatcccagcactttgggagatggatgtgggtggatcacaaggtcaggagttcaagaccagcctgaccaacatggtgaaatcccatctctactaaaaatacaaaaattgtctgggtgtggtggtgcgtgtctgtaatcccagctactcaggaggctgaggcaggagaatcacttggacctgggaggcggaggttgcagtgagccacgattgtgccactgcactccagtctgggccacagagtgagactccatctcaaaaaaaaaaaaaaaaaaaaaaaatccattgtattcctccatactggcatcaaggattggaaaaacggaaattttaaaatactatttcaatagagtcaataaagataaaatacttaggaagaaacttattaaaagatatacaagacctgtacaatgctgatttcaaagctttaaataaatggagaaatacatgtttgtggataggaagccccattttattaaggtgttcattctccatatttatctatagattcagtgcaatcttaagcatcatcccagtaggagatgaaaaagccagtttaaaaatctatgtggaaatgtaaaggatccagaagaggtaagacagttttgaaaaaataagtacagtatgaattgcttaacaatggggaggcattctgcagaatgtgtcgtgaggtgatttcgttgttgtgtgagcatggttgagtgaacttacacaaacctggatggtatcgcttactacacatttgggccataggggacagcccattgctcccagactacagacctgtacagcatgttactataactgaacactgtgggcaattgtaacacaatggtaagtatctgtgcatctagacatagaaatggtatagtgaaaatatggaatcaaagatgagaaatggtgcacctgtgcggggcactcatcatgagtggagcttgcaggactggaagttgctctgggtgagtcattgagtgaaggcccgggacattactctacactactgtagactttctttttttttcttttgattctttttatttttgagacggaatctcgctctgttgccaggctggagtgcagtggctcgatcttgggttactgcaacctccacctccccggttcaagtgattcttctgcctcagactcccaagtagctgggactacaggcacgcaccaccacacctggctaatttttgtattttcggtagagacggggtttcaccatgttggccaggatggtcttgaactcctgaccttgtgatcctcccgccccagcctcccaaagtgctggggttacaggcatgagtcactgcacctggctgactactgtagactttctaagcactgtacacttaggctacactacttatgacaaatattttccttttcttagtaataaattaaccttagcttactgtaacatttttctttgtaaacttaaaacatttttaaactgtttgattcttttgcaataacagactaaaacacgaataccttgtacagctgtgtaagaacattttttccttatattcttattttaaaagtgtttttctgttcaaacatttatgtatgtatgtatgtatgtctgcatttttgctttttaaacttttttgttaagaactaaggcacgaacacacacattaccctaggcctacacagggtcagggtcttcaatatcactgccccccacatccatgtcttgtctcactggaaggtcttcagggccagtaacacacatggagccgccatctttcatgataataataccttctctggaatacctcttgtagggcctgcctgagacagttttacagttaaaatttttttaataagcaaaggagtacactccaaaataactataaaaagtatagtataggctgagtgtggtggctcatgcctgtaatcccagcactttgggaggccaaggcaggtggatcacctgaggtcaggagtttgagaccagcctggccaacatggcaaaactccatctctactaaaaatacaaaaaaaaaaaaaaaaaaaaattagccaggtattgtggcaggcacctataatcccagctacttgggaggctgaggcaggagaattgcttgaaattgggaggcagaggttgcagtgagacaagatcatgccactgcactccagcctgggtgacaagattgagactctgtctaaaaaaaaaaaaaaaaacagaaaaaaaaagtatagtatagtaaatacataaatagtcatttattatcaatattatatactgtacataactatatgtactatacttttatacaaccggcagagcatagatgcagtctggtggatgttgcctgaaatgtcattacgcagttcatgactgtacaaagaggaacacatgctctctaatgtcttaatctaccagctgcaatcatcaagacagtgtagtattggtgtaaagacagacataaaagatcaatgggatagaatagagacttcagttcatatatatggtcacatatatatggtcaatttatttctaacaagggctctgggataatccagtagggaaaggtaactcttcaacaaatggttctagaacaacgagatatttgtacagaaaaaaataaatctcaaccccctacctcaaaccacaaacaaaattaattcaaaatggattatagacctaaacataaaagctgaaactataaaacttgtaaagaaaaacagaaaatcttcacgacattagatttcttagaaaagacacaataagtgcaaaccaccaaaggaaaaaaatgaataaataaactggactgcatatcaaggaaaaccctccactttttaaatacatcattaatatatgtgacaaagggctttttccaaaatatataaagaacacttacgactcaacaagataaacaatgcatttctt[137 bp omitted]agctccgcctcccggattcatgccattctcctgcctc[176 bp omitted]cctggccttttttttttttttttttttttttttaaagacagagtcttgctgtgttgcccaggagtggcacaatctcagctcactgcaacctctgcctgctaggttcaagcgattctcctgcctcagcctccctagtagctgggattacaggtgcatgccaccacactcagctaatttttgtatagccttaaccttctaatcatacctagggagcaaaagcaggaggcatattaaaaggcactgggctgggcatcaggagccccagcttccgtttccagctcagtgactgacttgctatgtgaccctgggaaagcccctttcacactctgagccccagaaaccacatccataaaaatggggagaacattattattgcctcgtatgcattttatgtggcccaagtggcacaggctatggaaaggagttctggagtgcaccaggatttctctagatggaaggcatattggtgttgtttttgaccttttagagattacagatgattgttacaataggggcacccaatctgaatgatcagatgtagtgacctggttatctgaatacctgacagtttaccagcgacactcatgtatgcatatagacacaaacataaaacaggaaacacatggatgttataagtcacaagagtcatccatacaaacacaaagatatgtgtatccacaactggcccacacgggcacatggaggcccacaggcatacatgtatgcacacacagaaaaacacaggtgcatgtgtacacacatgttcacatggacacacatgttcatagaccctcacgctcccagagcccacattcagtgagcacacggatgcacacagatgggcccagttgccgcacacacactcatgaacaggcaaaggcatacccttgaacatgaagaactggaatacaaagagattttacctggagaagctgtgagcccaaggcagagggaggaagggtatatcctgctgaaggtgagcaggtccaggactccctggaagaggggcttaaggaagggttagagcatcggaggcagaggggctaggggctggcagagccggggaagccacccacagatggtaccctcttcagggagtaggatctgagggattcctagggcaggcgggccttggttgtaggccctggaggtagaactgaagacttccgtgcagttctgctcatggagtcaccagccagccactcccagaaagtagaggggaggggcaagagatgactgtagcctggggctggtggcccgggctaggcctcaccggctgccgctggaatgaaaaactcagttttagcttctatgtcgggatttgccagtgggttcatttcctgggtgcagattggttgagggagaccttcctttatcgattcccctttacggtaaaaatgacctgcaaatgaagtcaatcttccaatcatacgccaggacagaaagaagctgcgagtatagacaagagcactggactgggtgtcaagagccagcacgtgggggtgtaaggtttggctacaggctgagatgagaaagcatcttaagagccagaaggtccaattcagactcttggcagtacgggaaagtgcggcccaaagctgggatggcgaccagctctttggtcatagcagctctgtccacctaagataa[184 bp omitted]gtggtgggcgcctgtagtcccagctactcgggaggctgaggcaggagaa[131 bp omitted]gctagttccagaccttctcatcagctcctgcagaatcaccctcctggtcctctcccccaagtgaaccccatggagttggacccgtcattccctgaaaaggctccacggctgagactgagcctgggtccattagcattcagctcagcagctgggcaggaaggagaacagtatcagggtggcaggaagaaaagcagggctggaagaaaagggataaggatgaggaggaggtagagggggtgcaggtgctcttccaagctgtttgcccatgggctcagaggggctaaataattcactcatttttatccagttagtgagaagcagggccagggatttgaacccaggtgtatgtaagactctcaggagagtagagatcattctacatgggaagagctggaaatcttccaggggaaaagacttgcggagttagtctgactggattccatcagcccagtcctggcaaggtgtgctacagaggggatctccgctcagagacttctctgagcctgagttaggtgaggggaaatgaggcccagagttccaagaaggggactggccttgagctgggcacacagacctgcatgggacaagctccttacatggtgggtcagaagctggggactcaggaaagtgagaatgtcacagtgcacagagtgtggagcaggggcaggctaatgcagagttccttcaattccacactgcagaagaagcttccctgagaacgcaccattgctgggctccttatatgcctcacctctgaccttctctctggaatctcgcaccatcgcccttaaggcagctgtcttcatcctcattctgcagatgaggaaacaggtttagagaagttaaattcacttgtccttagtgaaccagagtccagattctcatggtccagtccagggtgccttctcctgctgatcacggcaggcttttattccccggagcctttgttaatgggcttccctgggcctgtgactgccaaggcctggcaactttgacatgttttcgtggggtttcctctgtgctggtctctggattttccaagtttctcatttgcaggtccaggggaaggagggttgctccatctcaggccctaggaggtggtgctttggcaaaggggcaagagacccgtgatctggccccagctctccctcagtcaagctatatgaccttggaagagtcatttctcatctctgctcaagataatgtcatgctgtagattgaaggtttgccctgggagacctctcagccatctctcatcctggaccatccatccatccattcaccttccatccaaccattcatccatcctccaatgatccatgcatccatccatccatccatccatccattcatccatccatccatcgattttccatccattcatccatccattcatccatccatccatccatcttccatccattcatccatccattcatccatccatcttccatccattcatccatccatccacccatccacccactcagccagtcatctattcaacttttcatccacccatcatgcatccatctgtctctccattaatcctatcaaaccctgggttgaaaaaatagcataaatctggccctttataggacaaaagggccagagagcaattactttatgttttccaggacacatggtctctgttggaactattcaactatgcctttgtagcacaaaaacagccagataagaggtaaacaaatgggtgtggctgcatcccaatgaaactttatttgcaaaagcaggggacaggctggattttgcccctggactatagtttgtggccctttgccctggataattgctgggtgctagagacacagatacagacacagtctaataggggaggcttgcatgtggaccaaaaatgatagtgcagtgtgaaaagtagagatggcttaaagggtgcacaaggcacagaaggaacccagaaggggacctgggggccttaagtgattaggccggtgtcagtggttgaaacctaatcagggtttcggtggatgagggaagagctctccaggcagatggaacagcatgagcgaaaacacagaggcatggtagtacctgttgtgttggcaaagactgtgagatttgatggctggagaatgcagcagaaatgagatcaaggaggattttaattactgtgctaagaagcacgaacttttaagcaaataattctcagttatttaactcctcttcaatgactaacatttttcttggaaagagtccactccataactgctaatctcagtgaggggtattggatatgcaatttcttctaattatgtggaaatactggttgtttcttctctgtgggtgctgaggccctgggggcagtgatggatgcctaggcggtaggcagaggggcctaggaactgagcatggctgatttgcaccacagtagagccctgggctctgatttcacactctgccccaggccagagcgattctgcctgtgtcatcattatgctcatcaagagatgctttgtcttcccctgatcagcctaattgctcccctcatttggacagccctggagtcatttagtaatgaaaatcaccgcgtgctaatatggcatcaggagctcacctgcttcttggcatttggagcagtgtggagaggggaagaggctctgcttgtcattacaggtgcagagcctcgctgagctgctcatgtgcaattaccgtccaacagcctggaaattacagtccagttacagtgcctgctaacaaggactaattgtaccacaacagagcttccctggacacttaaaacaaatggccactgtgggaacttggcgatgaatagagaaaaatcccatctattcttggaacacaggacaaatatgctaggagttgggcagggctcagctgggggctcttgggcattaaaacttggtttcccaatcaatgtaaccaagctagaatttgatgcagacatccattcatccatccgtcttttatccacccatccatcctccagtgatccatctatctgttcatccactcatccatcttccatccatccacccatccatgtatccattcattcatcaatccatccatattccatctacccatctatccatcctccaatgatccgtccattcaccttccacccaaccattcatccaacctccagtgatccatccattcatccatctgtccatccatccatcttccatccatccatccattcatcttccatccaaccattcatccacctccaatgatccatccatccatcctccaatgatccatccatccatcctccaatgatccatccatccatccatccatccacccactcagccagtcatctattcagcttttctttcttttcttttctttttttttttttttgagatggagtttcactcttgttgcccaggctggagtgcaatggcactatctccactcaccacaacctccacctccccggttcaagcgattctcctacctcagcctcccaagtagctgggactacaggcatgcaccaccacacccatcatgcattcatctgtctctctattcatcccacaaacttcccccaaactcttgcttagaaaaaggtctatccttgatgctgcaagtcagaaatgtattaggagaaatcctgcatacaagaagatgtaataggtacttaaatatttttgaacaagtgaacaaaagcagtcaacattttctcaatggaagggaaaaatagatttagttaagtgagagggtgaagaggggggcatagatggtgtgagaatagagaagatataaagagttgttcatcaccgtcatacacatagcttaagtgaaagacaggaaagtaaaagggaaggggatgtgtgtgtgctctgtgtttaagtgtggcaagttacttcatttctcttagtctcaatttcctttcccagacaatggggataaaaatgcttcctacctcatggggttattatatggactacaaaaaatactgcacataaagttcctagaacaatgcctggtatgtagtaagcaggcgctgccattctgctgcctactcctggggacttgaaggttgagttagagtccaccctacctagacagtaagaaagaccatcctaggaattggcaacgtgtagatgattgtaacacaggggaggctttggggggagtgttaatttttgcatcttgtgactagagcccagggagtgaggggcagtgatggggggaaaaagcaggtcagaggccccatcagtccagaaagagctgaggattgggatttgcaatgggggagatggggagccatcaacacattttaagcaagcaatttgtttttcaaaattattactgtagggtgggaaattgattattgttcattaattattgctttaagaggagatgattgtgcaaggaaaacaaatgagtcctggtcattcaagggcagagtctagatgagaactgctctagcgctcattcctggttctagctgccctgaactctggcctctaggctccctgttcattgttttctggcctgtagctaagggggtatggaaagaatgttagagttatgagttcccctgccctgacaggatctgtgtagggtccgtacatctccatgttcttcccctcaatgcatccctactcacggaaccctgctaagtggtcatttcaactctcctctatacagctctcctctatactacttcctgagccagcctgcttcttctttggccatctctgacccaaagtcctttatcctatgaaatgtcaacccatctccccatggattctaattattcactctcgttctgctcctgagtcactgggcaggataggtctcaatggcagcccatgcacctgactcattctggggctgagacccaggctcagtttgtggtcagtgctcattgtggccacacgggtgctttggctgcagtggggctcatggtggagcatttcccaggaggggtgatggtggactgacccctccagggtgccctgcctcctggggatcatgctttggtgtagtcccttccacatgggctttgggtttggccatgtgatttgcttttttttttgagatggagtctcactctgtcacccaggctggagtgcaatggcacggtctcggctcactgcaacctcttcctcccaggttcaagtgattcttctgcctcagcctcccgagtaactggaattacagggccccccccaccacgcctggctaattatttgtatttttagtagagacggggtttcactatgttggccaggctggtctcgaactcctgacctcatgatctgcctgcctcggcctccaaaaagtgctgggattacaggcgtgagccacagcacccagccatgacttgctttaaccaacagaatgtgttggaagcgatgctatgtcggctcaagacttaacttcagaaggccccttccactttcacactccttgaagccagcctctgtgtggagaagcttgagttggactattggcaggagagccatggggagaaaagccaccgggatggaggctgagaaatcatctgggatacccaaacctcaatggagctctgctgagtgcagccactcgagtgacctctgcgaaatcatgtggagcagaactgcccagtggagcccacatgcccttagaatcctgagaaataatacatcatggtcgcttttccaccatcgcgtgttgggatggtttgaaggcagtaatagagaacttctacttggactctgagcaagtacttcctgtccactcctagcacaaagaaaggtgccagctatagccattgagtctgagtttcaagccagacttgtggcactcactcctacatggtcctaggcatgtcctacttgggactcagtttctccatctgtaaagtggagagattgtaaattccatgatcttatctcttttagctgttctttgatgaagctgaaggactctagatgaagcatgaccccccactctgagcaggggctccttctgcaggtgtgtgtcagcttaggggatgtttctcatgcccatagcctcactgacagcagaataacctagggccagtctttctggctgatccacttggaatcacacacttccattccaggttgtgccaaactcaacctgatgttccttgtggtccctggaacggggctgcctgctggggtgttgactaactgggcgtgtcaaacttgggaccctcttcctctgtttccttgttcctcattaggttcctcattggctacaaatgattcacttagaaggcaatgggaactggcagtgatgtttggagcatttcttccttgatcaattaacggccttctccctattttatttatgtattattattatttttagatggagtctcattctgttgcccaggctggagtgcagtggtgcgatctcggctcactgtaacctccgcctcctgtattcaaataattctcctgcctcagcctcctgagtagctgggattacaggcgcatgccaccacgtccggctaatttttttgtattttagtagagatggggtttcaccctgttgcccagtctggtcgtgaactcctgagatcaggcaatccgcctgccttggccacccaaagtgctgggattacaggcgtaagccactgagcctggccctccctatattattatgatatcagcaaaaataaaattatgaggtttatgcaaatcatatttgtatgatcacgtctgagagcctttggatcaaattttctagccaatttctctaaatgcgagcttttaaacttttcctttattgttgacagaagatgcttttagagattgcactgtgtcaacttcagagacaaccagaaggttgggagggaaggaaaaggcaccctgtaagggatgacggaggggctgggactcaaactggagaagagaggtgaggcccaggctccatgtgcggaattcatccgggctctctctgggtcaaggaagcaggtgtcactggttgacacaaacaactggcaaacagaggccaacacggtcaggcagaactttctagaagtctgaagtgtccagagagggagcaggctgcctttggagggtgtgtgaccccaagagaagaggactctgagattcagggaggggcagcatcttcccaagatcacccagctggtcagttgaagttctgggaccaatggctagaactggaagctgacacagtcccagagcccgagaaagggacagagatgcgtctgttccagccagcagttgcccttcccactcgaagccttcagtgttgggcaaggtggtggtcaagactccctttccctcaatggtgagaggacatggccagggtttcagtggaagcctttcttgactgctgagaatctgatgaacctcttcaatatttatttttccgatagaactgaacaattctgaagagacacaatattacatttcttagaagcttccccaattgcatagttatcagggaaacctgaataaactaacaagagcttagacctatttatttttgtattcagtcatctctgaggtgtgggttatgccagtgtgaacaagaagagacagtaattagattgtgcttagactgattctcctgctccaggaatgggaatagggccgggctgccccagctctgtggtcttccatgctcatggtgctggtccttcaagtttatacctctgggatcattggtttccaaacatggctgcatgtggaatcatctgggaagtttttttttttttttttttttttttaaactgatgcctgtattccacctgccgaggttctgatttaatttatctgggaacagcattggcattgggacttttacaagctccctaggtgatccgctgtgcagcagagattgagaattcttaatttagactttgaacctgctggggcaagctacgttcatgggtcatccttcctccttccctaggtttttttttttttttttttttttttgagacggagtctcacactgtcacccaggctggagtgcagtggcacagtctcggctcactgcaaagtctgcctcccaggttcaagcgattctcctgcctcagcctcccgagtggctgggcttacaggtacctgccaccacgcctggctaatttttgtatttttagtagagacaggatttcactatgttggccaggctggtccctaactcctgacctcgtgatccgcccacctcagcctcccaaagtgctggaactgtaggcgcacgccaccacgcccaggagaatcgcttgaacccgggaggcagaggttgcagtgagccaagatcgtgccactgcactccaacctggtgacagagcgagactccgtctcaaaaaaaaaaaaaagagaaatagttgggttgtcttcagtcaaatacattgataagccataatgactggttgtttcttaaatcacatgttgtttgaatttaactgggctaacttgcccccctcaaataggtttgcatgcttagaactgggcccactctgacatgggacaaaaattgctggtgtgtgaacattcccattctcattcccttccgcctctaaatgaaaataatttattctttgcctgttcagttccccagcaaccctttccagccttctagacggggttccacctttgccagctcagaccctcagcttttataatgcagagctggatagaaaggctggggactgaggaagggcggtcaggagatttgcattggaaagaagagagctgttccgagagaaaagattaaaagggaagagaaagagggtggggaggaaagaaaatagggaaaattttaaattgggactgagggtggagaaaaggaaaagatatttgaggaatgtctgccagatgtgtgtgtattgagagtggcaaaaggagaagaaatatttatattttgctatgcattgagaatgtaccctgtcctccctatatacacgggcacaatttccctgtagaggcttccccagaggtgtacataaattacaattgctttcagctatattttgctgtcagactacagattccttgaattgatcctgcacagggactggtccatttgggcctccagttatatttggaatatgctgataagccagggttgtgtggaaatggcagcaggtgtgagctgggaaacccttcaccacctggtggaggcatttcacagactcatgagctctcagagtgggaagagatcttaaaaatgggggccttcaaaatggtctaatgtgcccgggcgcggtggctcacgcctgtaataccagcattttgggaggccaaggcaggtggatcacctgatgtcaggagtttgagaccagcctggccgacatagtgaaaccctgtctctactgaaaaatacgaaaattagctgggtgtggtggtacgtgcctgtagtcccagctactcaggaggctgaggcaggagaatcgcttgaacccgggaggcagaggttgcagtgaactgagatgtcaccactgcactccagactgggcaacagagtgagactctgtctcaaaaatttaaaaaagtctaattccccctcccattttgaaattgattttctagagccccccgaccaagttcattctctgcttaaagacttcctatgaaagggaatgcatgactttcagagaaaactcactacaaccgtgtatagacctagcagttagaagtctgtctgtgttctcaaatgctattatcggtgatgtgaattatcacagcctcattgaacttcgctctggcgagtcctggcacagtttaaattattcttctccttcgaatcagcaattctgcttctaggaagtctgcgtcactcacacacatacacaaagatgcatgtccacggatgtttagattgaagcattacttgagagagtgaaaatgtgaagccagttcaatgtatatctacagaggattgccagtaaaaccacagtagatatcagttgtggaataatggatatgcctgtcctaatatggaaagatttccaagatatagtaagggaagaagtaagttgcaaatgataagttaggaaagagtgtgttaagaccccacagacttcatacctatacctgcatatgaattaaagatatgaagacatatagaaaaacaacgtaataaaattgataataatcagtcaaatcaaaaccgcaagataccactgtgcatcgatcagaatggctattacttaaaacacggcaaatcacaggtgttggtgaggatgtggagaaatcattcatggctggtagaaatgctacatggtgctttggaaaagccactttggaaaattggcagtccctcaaaatgttaaacatggagtcactgcgtgacccagcaattccactcctaggtatgttctcaggcaacataaaaactacatctagcaacatgtttgacgatagccaaaaagtggaagcaactcaaatgtccatcagttgatgggtctgtgaataaaacagttccatctataaaggggaatattattcggcgataaaaaggattaaaatactgatgcatgctaccacatggatgaactttgaaaacattatcctaagtcaaagaagccagtcacaaaagatcacatattgtataattctgtttatttatttatttatttttgagacggagtctcactctgtcgcccgggctggagtgtggtggtgcaatctcggctcactgcaagctccgcctcctgggttcacgccattctcctgcctcagcctcccgagtagctgggactacaggcgcccaccac[175 bp omitted]tgtgcacttctgtagagacaggaattagattagggttgcttagggctagaggagagaggggtctgagagtgaggctgatgggcatgggttttttctctagggtgatgaaaacattcgatagcctgtaatgatggttgcataattctgtgaatatactgaaaaccactgacctgtgtgcgcattaaatggatggaccgtatggctgtctgtgaaatatatctccataaactgttttttaaaaaatgctaattgtgtttgcattttgtgtgtggggggtggagtgttgcgttaggagggaggagtgaaggacttgccttgtcctggtgatttgtttcaggtgacaaagcatgatgacgattcataggcattccagggaggcatttgaggcagagggctgctggctacccagccacacagctttgacaaagccacacatcgagtctctaccttctttgcctctggggccagtggctgtccctccatgggcaatcagtggcccaggggtggcagtgcttatgcagggtgactcataccacttttcctgggcgcctttcctgactggtggtttctcctgggctctcataagccctcgggtgactcagggcagagaatgagctctttggcctgcccacttctggggatccctcgtgccagggaggactgtgagaaggggaggctgccgggctcagcagggattcagctgacagaaagaagactgtcagagaagatgctaagtctgcctggatgacagagccgaccccagagaggctggattgacgtcccccccccccaccttactgcaaacagaggcagagactggagccaaggttgagtgaggcagggccaatggccaaaaggggtcagcacacctggggccttcagttggcaggagccctgtgcaaatctccacagccctccacccacaggaacccaggcccacccaggctcatcggcctgacacagaacggcagaacgcatagcacagcaccctagcacgtggcacccagaaaacacacttgacgtgcactcgatacaagcaaagcacaaagataccacagggcacacccaaagccacaacacctgtcacccaggcacttgcatcacacaacaaatgcacatagaccgcagagacacagaagcacatgtacaaatagaacggcgccctcccccttgccaagacatcacatggcacaagaaacaaatggaccaacacaagggaaggtccctgacagtttgtccattggccctcagaggccgatctggagcagctgagacacccttttcaatcccccagtctggcttgggtgccttcctctctgtcacctctctctgtccctcctcttcttgcaacaagtccactaggcctctctagcacatggtagagaatgtgctaccaccacaccaggactgttggctaacttgtttgctttcctctctttcctatccattggatataaggttcttttttttgtttgtttgttttttgagacagagtctcagagtgcagtggagccatcttgggtcactgcaccctccgcctcccaggttcaaccaattctcctgtctcagcctcccaagtagctgggactacagaaacaagccaccatgcctggtgaatttttgtatttttggtagagatggggtttcactatattggtcaggctggctcagactcctttacctcaggtgatcgatccactcggcctcccaaaatgctgggattacaggcgtgagtcaccgcgcccagccacatataaggttcttgaaggtagagtctgtgttctatgtatctctgagtctctggcactttgcagtgtctggggtataggacagggttagtgtataacgaatgaataaatggatcaagctatccaaatgtgtgtatatttacaaaaggaaatgttcaaccttcatcactatcaaagaaatgcaaattaaaatgagatgcaattttacacctattaaattaacacaaattaagaaatataattatgacacccaggactaacacagtcatggtctaggcatggcacccatacattgccggtggcagtgtgtaaattgggtgcagcccctttggaaaacagtttgattgtatgtatcaagagtcattaaaaggctgacagcctttggtgcagtgatcgcacccctaggaatttatccaaaggtaattaccaaaaacaagaaggacatttgctgatggtcgttggaagtgtcatttgccatcacacaaggccttgatttcagaacccaaaattgggatacacattctgacgcattgaacttgaggatagctgggaagaatagctgcagagaactgggaacaggggctgaccatgactgaattggggacggcaaagatagggaagtacatttcctgacgtcagggctctggcaggcattgttcactcctgtatcctcggctcctagtggagtatctggtacacagtagggttaagtgatatataccttaatatatttaatcatgatatatgtttttatttatttagctagcacagatatacatacactctgaataggatgctctgtggccattaaagttcattaatatgcaaacgtgtttaagatacaatgttgtaaagaattgatatttcttattctgcataaaaaggatttatgtgaagggaaacggaggtgaagagaggtcaagcgacttgctcatgccacacagccctgagtggggcaaccctggcccaaaccccagtctgttggacttaaccactggtctttgctgtcttcagaacaccctgagttattctactctgagggcctgagctctaagggtcctgggtcctgaagtcctgaggtcctgaggtcctgagttctgagatcctgaggtcttgaggtcttgagatcctgaggtcttgcggtcctggatcctgagatcttgaggtcctgaggtactgggtcctgagatcctgaggtcctgaggtcctgggtcctgaggtcctgagatcctgaagtcctgggtcctgagatcctgaggtcttgaggtcctgggtcctcaggccctgagttcttgaagttctgaggtcctgaggtcttgaggtcccaaagtcctgagatcttgaggtcctgggtcctggatcctgaggttctgaagtcctgtgttctgagggtcccatggcctgaggtcctgagatcctgagatccttagatcctgtggtcatgggtcctgagtcctgaggtgaaaagcactgttggggtgtctgctggagaagagatattttcccatgagagttcccttcctttgcgaatccttaataatccgagctcctttgtagacataaacacactagcctttcttaatgatgtatgcatttcattgtgatgggtaaggtacagatttacttttgaaaggtgaataaatttgctttttgttttttcaagtatgcattttctcagagaaaagatgctaaaaggttgactacaattttgcaagcgtccaagggattttttgttggtacaataaaatcctcacggtgaaaatgtagagaatgcagattgagtgcactgaacccaagggtgcaggggctggggttacaaggagggagcaggaatgtcccaaggggacccttccatgcagggtgagatactggggtcccggtcctgggaccagagagcttctcctggctgactgtccctcttgcctggagtcccgcaggtgctggtggggagagttggaaaggcactcccattagacctgattttctgttttctgcttctgtcagtgtctctgagggagacttacctagggctagtggggctttggacttaagagagttttgcttctgatttgggaagaaagcaggactctcccttctccctaagcccacctcatgaccacagagtctcatagagttgtggaggagagggtcctgggcacgctgactcctgatactgggagatgtgagtcatgccccacctcgcttgaatcaatgtctttttttagaatttaaaatattaaaaaaacttggaaataattttagatttacaacaaggtttcaaaaatagtactgagtccctttgtacctttacccagcttctccaagtgttatcgtcttccatactcacagtatcatgatcacgaccaggaatttagcatcgatatgataatctaactaatctgttcatattttgccaattgcctacattgtgtttcgttgtcaaagtttcttgtttccttcagtctgagatagtcctcagtctatcttttatggtttggaaacttttgaagaatactggccatctgttcggcaggctgtctcctcactgtggtttgcctgatgtttgctcacgattacattgaggattgcctttttgcaagaatcctgcagaagtgatgctgtgtcctcagtatagcctatcaggagacacgcaaagtcagttcatcttggttaaagtggtgtccgcctggtttttacactcgtctctactctctctttttttcctttgagacagggttttgctctgttgcccaggctggggtgcagtggcacaattaccatcaccacgtgctttagccttgacctttcagactcaagtgatcctcccacctcagcctcccaagcagctgagattacaggaacatgccaccatgcctggctaattttttattttttgtagagacggggtaaccctaggttgcttgagcttgtcttgaactcctgggctcaagtgattctcccagctcagtctcacaaaatgctgggattacaggtgtgagccacctcacccggcctcttcctttctttacctgtgtaatccctcttcactggctgggcgcgcagtggctcacgcctgtaatctcagtactttgggaggctg[132 bp omitted]gaggcagagaattacttgaacccgggaggcggaggttgcagtgagccgagaccgtgtcactgcactccagcctgggcaacaaagcgagactctatttcaaaacaaaaacaaaaacaaaaaagactttcagctccccttgtttatcctcactttatagtgggtggcacagagtctcagaaaggtgaggaaagctgcccaaggtcacacagccaggacatggtctgctcccaagtccatgtttttccctcgttctccaagatcaagtcttgctcaaagtcactgagaatttcactctgctgggacacaagcccaaactcctgtgccacctccctggagagttgggaaccaaggaaataatgaacataaaatgtatatagcgctttataattgacaagactgtccatctttatggcagacacctgagtcaggtggcgctatcttcatttcgtagaagatgaagctgagggtgagggagtttgtgtgtcctgctcaaagtctcagcctgtttgtggcagacctgcaattttaacccatgttgttccactccaaccccaacccttgactatgtagatgcctcctttttctccacctggataggagagtgctggttcctgggcagggtgaggggtgctgagcccatgagggagaggatgctcatctcttttagaataaccaagatctctctgagtattacctatatccacaggcggtgtcttacaggtgatttgcatgcttcataaaaacataatttataggaatgataaaattttatgtgatttataagacccgttaaatgtatgagggacccagcggggctcatggatccctctgctgtctctgatttggccaatcagcagttggccctttaggaaaggctggcctgagtgttgtcctgggcttggtgtggcggtcccagcctcatgttgatgaaccagacaaagttccagggatctgggggaggaagggagacaagaggaggacccacagaatcacaaggccagggtgtgtcttagttgcgaaccctgcagcgttgtagaaggcctcctggaggcagtggcactgccgagaaattgtgacattggacaggatttaagcagaggaaggttggagttgcgtggccgtcccagtgtttgcaggggtgggaatggagtgtgggtctctagattggggaaaggaaggaaggctggcgttctgacagttcttccttctcagggaattgaagccttaggcagggctggtcagaagctcagtgcctgcctaggacacagaatttgaagacaggaaggaatccggaaatccttgttatctgtggctggcatgtgccataagacttcccctcatcagcaccgtagccccccatatctggtagcaggaggaaggggattctggttgaggaagagggaagcagattaggccttgcgactgcctcccgtggccctgagcattgtgttatgaggaatgctccatttgtaaagggaaggggggtgcaggtctacacccacagaaggtggactggggtcatataccagaatctttctacaggcagataatgggactagccctctctcagccttgcagataaaaggttatggaatcttttgacaataaaagagagagagacagaaggtcaagcaccctgtgactctccggcggaagcaggaagagacaaggtcgttgcctttccagcatgttctcttggttttcaggcaaaatcttttaggtccaccctacctgttcagaagcctgagcagcaggctggagccctttcttcctgtgtccccatatagacactcatttgcgacactgctccccagtatatgtcacagaccctcaaacctacacgtccataatgagctcatcaccttcacctgagcctgctcctgtcctgggctctcagctcagaggtgacctcgctggcccctaagccagaaacagaggcatttttctctgtctcccttgtccctcacccccatattcaatcaccaagccctgcccttttgcccctcaaaaatctctggaatttccccacccacttttctatccaccgtcactagcaaagacatcatgtcttaccttggcccttgcatggcctaacagcctccctgtgaggccatggtcgctctactagacaatccttcacactgcccagcagcaatctttcccactcacatctggccccatgtctctcgcttgcataaaactcttcacttgctccctggtcacctatggcatcaagtcctaggccttgggcctggcattcaaggcctttcagacatggctctgctgctttttgcagtatattctccagcagtcatccccagttgcctgttctatgccaatgtcacatgtatttgcctgagaaccccatgttgtttcgctccctttggcttttccaaatgtaattgactctccctagacatgacatcccaatatgtctctctggaaaactcctattcatccttcaaaaccaactcttgtgacactgcctctctgaagtacgccctgacttgcttcacaccattctgccctctctactgtctgtgcattagcacgtgttgtaccccactgtgattatttgtttgcacatccattcccatggtagtctgtgacgtccttaagggcagaggccaaatctctctcttttcctctttcctcccttccctcctttctgtccttcctctcctccttccttctctcttctccccccttctctttttcttcctccccctccgccagtcttaaccttccagccgtcagctctttcctgagtgccaaccgacatgccagctctgctctaaagtttgcgcattctcacagaggtgttgtccttgacaaggccccacatcaataaattccacggtccccttgggatgtgaactgtaactaggagtcgtagccagacaatctcacagaagacgtgccctgaagaaagcagagtagcgtattgcacctagagcaagcgtcaggtggagaggggtggggtggaggaggtctctgctgaagaggagccatttgggcctgaacaacaagagggatttggctgtgcaaggagagcaagagagagaactgcttgttcaaaggccttgcggtggggatgagcttggtgcatggaaagagtaggctggcgaggcccaagagaagtgagcaggggaggtaggcacagccttgggaggtgagggcacaggtcattcctaaatccctgcctgtgtcttgtaatcccccagctacattgagatcccagaaccagagccactagcaatctcaccctaagaggaagagaaggagagccaggcatggctgtctgcagtgtgcctctcacggatacttcttttacctggcggacagcccagcgcctagttgtctgacccgtgatcaagatgtccttcacacggaaaacttgtttattctgacaaatgccttggtggttgctgtgtccagtgaatgcctgcctgaccatcgctcggagctgggagcttgtgttatccactgcgtcccggggaaaacctgctggggcagcccccggttcttcctttcttctctgcaactggggttctctgtgttcagggattacccaaaccacggctttctttggagaccagtgatggcaaagcgttctcttctgctcctgccaagtcgccctcactcagctcaaggcctctggcattccttggagacttctgctcactgctgttggaggaagatgctgattcaggccagattccatcttggggtgcgtgcccttggtcttcctctgccccacacgctccttccgcagctctgtgcatggttgctcctgcctgtcattcaggctttggctcagacagcacttactcaagagaacttttttggtagacgcatagcttttaaattttttttaaattttttaattttttaaacgtagtattttgattcaggggatacatgtgcatgttcgtcacagggtatattgtgtgatgctgaggttttggcttctattgatcctgtcacccaaagagtgaacatagtccccagcaggaaattttttaacccttgcccccatccctccctctccccttttggagtctcctgtatctgttattcccatctttatgtcatgtgtactcaatgtttagctcccaattataagtgagaatttgtgggatttggttttctgtttctgtgttaatttgcttaggataatggcctccagctgcatccatgttgttgcaaaggacatgatttcattctttttcatggctgcatagtattccatcgtgtatatgtaccacattttctttatccagtccactgtcaatgggcacctgggctgattccacatctttgctattgtaatgagtgctgcaatgaatatcagcatgcaggtgaggagaccttcttgattgccttttctttttccttctttttttttttttgagatggaatctcactctgtagcccaggctgaagtgcagtggtacaatcttggctcactgcaacctccacctcctgagttcaagtgattctcctgactcagccgcccgagtagctgggattataggcacacaccaccacgcctggctaatttttgtatttttagtagagatggggtttcactgtgttgtccaggctggtcttgaactcctggcctcaagtgatctgcctgcctcggcttcccaaagtgctgggattacaggcacctgccaccatgcccagctaatttttgtatttttagtagagataggatttcaccatgttggctaggctggtcttgaactcctgacctcaaatgatcctcccacctcagccatccgaagtgctgggattacaggtgtgggccttttctgagcggtgctctcgatactctttatccccttgccttgtgttattttcctccctgactcttccatccatgcttgggggatccaccattaaaatgcagactccttgagggcagagacgtgtctcttccgtttacccctattacttatctccagcacccagaacagtgtccagcgcatagcagtgatccgtaaacattttctgagtgaatctgatgttttcctttttttccccctttttagtgattaatatgcatggaatcctcatcaaagagcagattgtgtcaaatccacagagtgtgtgactcttgcatggctcagaactcattatcttccagcagcaagttgagagattcttggacagagatttaaacaaacgctcacgttgccgctttgacccagctaaccttccggcgagttcagagtcataaaccattattgtctctgcaggcggggagtactgcgggcgcctcttggcacctggtgcctccgtctgaattagtagctcattctctccatctgatgctgggccaggaatgagagagtttacacttccctgtgtgagcctgctcttggcatctttaatggtgttctgtgaccaaagagacacactcagggtcagataatctgaaggcatttgttgatttggttttagagcccagaaaaaccagtgaatgaaaaagacaggcccagggtggtgtgtgggccagctggcagggcccggaccattgcccaggacccgactcctcacctggtgttttcccattgctctgggctcctctggccatccaaagatgattccccattctcatggtttctgtgctcatccctgccacttggcagctgtggcttttcatgaaatttatgcagcaaatggttttttagttgtggtcaaatacacaaaacataaaattgaccatattaaccattttttttttttttgagacggagtctcgctcttgttgcccaggctaaagtgtaatggtgcagtcttggctcactgcaacctccgcctcccgggttcaagcaactctcctgcctcagcctcctgggtagctcggattacagggatgtaccaccacactcggaattttttttttaatttttagtagagatggagtttcattatgttggccaggctggtttcgaactcctgacctcaagtgatctgcccacctcggcctcgcgaagtgctaggattacaggtgtgagccaccgcgcctgacctcaagatatattttcaatgggatgtcaaacctctagatttccccagatgatgaagaccttagtgggtttaggcactcagaaacttcagagaaaattccttcagtttctttttgtgtgctagggagaactttcacacttcctgtggggcatgaggtaaccaggagctgtctggtgctccttggttgccactgggcacggagccctggcattcagagaagacggcatgaggactagaggagtcaggagggaaggcaaggttctcttgggtggggttacctgcaggtgagggctttgagcccgggaaagctcctcttgtgcctctgattgcctcttacaccacccaactagcccacctaagggaggggcagtgaaaatagggaaaagataaccctgtccctgttacaggaatattggggaggcacaaactgagttttgtggggccagggtcatgtctcagcctaaagctggggccaatccacatatcaggatttatccactgtagaattagcccttgacattgcagacctgcctcaagcaaagaagatgaatgccagaggacagagagggcctttttccccctgcatgtctcagtggatagaaagggcagagaagaaaaccctggcctgctgacagatcagcgagatggcaggcaaggaggctggtcctgcccggggttcagtactttatttgctgtcaagcttcttcaggtgcattagtgactccttgatgttaaatacctgctaattaacaacagctgcaatttgcctcgcctgggattgtcgggggagggggggcggggggagttgacacctgggctgggagctctctgtcccgggagacaggagggcattagagaaagccacaggctggtggggaactgtgcaaagaaatagtgccctggtggctgaggtgtcctgtaccatcaggactagcatggtgatggttcaaattccagcgctgacgtttgcaagcggtgtgcacttggggaagtcccttctctctgaaactggttatcatctccgacatgggcctagtaccgcatagagttactacagccttagatgagatgatgcctgcagagctcagcacagagcaggcttattgaaaccctcaacagctggctgagcggtgtgtttgaggaagttgtaataaagtagaaaatctggtgtttctccttcatgtctatcctgcctcagtttctcttggtgacctcctttgaatgtactgatggctgcctcggtggccaatcttatcttggggccttaccccactctgtatcttggttccaccagtttgaagaatacttggctgggaaaaatagttttctgatcattagactaaaggtccagggcactagggaagtctgctgtgtggctcttttgggggttgggggctgagggtggagagggtgctggcagaggagaggaaaggagacatctgagtctgggggagcttcttggaaaatgtgagctctgagcctccgttagaattcccaaggtctatccacaaggatacccccatgtcaactttttttttctttttaattttactttaagttctgggatacacgtgcagaatgtgcaggtttgttacgtaggtatacatgtgccatagtggtttgctgcacctgtcaacccatcatctaggttttaagccccgcatgcattaggtgtttgtcctaatgctctccctccccttgccccccacccactggcaggccctggtgtgtgttgttcccctccctgtgtccatgtgttctcattgttcaactctcacttatgagtgagaacatgcagtgtttggttttctgttcctgtgttagtttgctgagaatgatggcttccagcttcatccatgtccctgcaaaggacataaaccaattattttttatggctgcatagtattccatggtgtatatgtgccacattttcttcatccagtctatcattgatgggcatttgatttggttccaagtctttgctattgtaaatagtgctgcaataaacatacatgtgcatgtgtctttatagtagaatcatttataatcccttgtgtatatacccagtaatgggattgctgagtcaaatggtatttctggctctaaatccttgaggaatcgccatactgtcttccacaataattgaactaactattaatgaaaggtctgaatgaaggtggtagcaagaaaaaccttggtgcacagggtttcaccatttctctgacacccttctctccactccaggctctgatttgatcctcataataggcctgtgaggtgagtgtgaaggaaagtggaggaatttgttgttcaaataagtggaagtagcttctgtccctacggatgtcttatggttcaaccctgcatctgtctatcagccacacagcatctttccaatagattcctttttggcttaagttagagtagcttctatggcttgacacacacacacacacacacacacacacacacacacacacgcacgttaactgacaaccagtaatggaaaatcatgtgactatagtaaaagaatcttactccacttgtagccacagggttgagattgcaaaaaccaaactcagggatggatgttgctgttgctgcattatcgtgtctcaccagccttcacgtgaaggaaaggatttcagatggtatccactaacaggaggagcaaatcttggagcatctggagacatcatcacacccacattgactgccctgtcttgacctgttcattggtgtttactaccagctttgaatagaccccagagcatgaagaagttcttgctttagttttctgtagttgctgtattggattaccgtaaactcattggcttaaagcaacacatatttgttatcacacagttctgtaggtcagaagtctaatctaagcctcaaggggctaaaataaaggtcttggcagagccctgttcctttctgaaggctctaggtgagaatctgttttctcgccctttttccagtcctggaaacttctcatattccttggcttgtagctcccttccatcttcaaagccagcaataaccagttcaatcttgatcacatgacatcacatcacatcccatcaccctgtctcttctcttttgccttccttttccctatgtaaggacccttgtgattatattgggctcaattggatgatcttcctattttaaggtcggctgattagcaaccttaattccatctgcttccttaattcccctttggcatgtaactaacttattcacaggttctggggattagaatgtggccatcttagggatggggtcgggacagagaggcattaatctccctaacagttttccagctcttccaggctgcagttaaattattaaatactttgtcatttggccttttgggatactctatggtgccttggatgagccctgattggaaaaatcacagtggagctccttaaatgttggagcattagcaagtaattaaacttcttttgtgaaatgcatgctgaatgtctagtcagggaagatagacaaccatgcaatctgagctgttcaggggttattgattgatttagccatgaagttaggttttcccaacaacactccatcaaagaaaagtgctgtatatggaaacaaaacttctcaaatacgtcttggataaggtatccatgaaggcctgcatagagcctgtgaatgggttcaacaatgtgggtcaagtttgttctggaaatcgttgctattgattctgatttgccagcagtagcagctaacttgatgcttctggttctaaagaactctgaaaggtctgggatcttactttgcaagctaattatttagtttgttacagtttcatgaatgctggcagaagacacgagactcctggatcagagaaaaaagactattactcacagcaggcacagcacacagcatgagcttcatgtttgcatcagctgtccttatccccaagttccgtgaggtgatgcaaaatggcccaggtggatgctgcataggcagtaggtttgtgtctcagcgaaggaacccaagcttaggaagctccaacgttttatagtgagctgcaggcaaaccttcttcatcctttgcctcagagggaaacattctttttattagtctggacagcaatcaaatcttccctcttccctggagggagatggtatatcttctaaggctgtttgctacacaagcatccttgaaaagatagtgtggtacaaaagctgtcaatgtctctgctcagaaggcctgcagaattgtgggagacccacggaaaatgtctggtatggtaataataatggtatataatgccttcaaagtccaccagtgcctggccctattcattcaactcatttaatccttagttgattctattatcccatttaaaagatgaaagaaaatggaaggcacagataagtggatctacagaaggcagatctgggagtagagtagagcccagactttgggctctataccatattctgaggggaccagccagccatgtggtggcagcctgattacctagtgggcagttttcattatggaagtggctacaatgggaactccccggaatacacaccaatttgcaatttgggcttgtttttctctgcctgcatgccttggccataaccaccacttatgaatttagcgaatggctttttttttttttttcgctcttgttgcctaggatggagtgcagtggcacgatctcagctcatcacaacctctgcctcccggattgaagcgattctcctgcctcagcctcctgagtagctgggattacaggcatgcaccaccacacccagctagttttgtatttttagtagagatggggtttctccacgttggttgggctggtctcaaactcctgacctcaggtgatctgcccgcctcagtctctcaaagtgctgggattataggtgtgagccaccgcacctggcttgtgaatggcttttgtagcacatagcatcgtgtaaagatcaccttccatttaaggagttatattacaacaaaagacgggggtccatggactgaggcctatgaatctcactggtaccccattttcaacaagaagctgcctctaaaaagatttgaatggtctattgaaaaatcagctagaataacagtcgcagctggagacgatagctcataactttgggatgctgtcttgcagggtgtgaaatatattctgaacccacacccaatatacagtggagaaggggtgtccccaagggtcctctttcatcatatgccttcacttccatcatgtattgataggttttcgttcctgagggagaaatgcttccaccaagaatcacaatcaaattccatcacattggaacccaagatcgtcccttggttatcattagaggggaatttggcgtctcctatgttgattgttctgtggaaggagggatttagggattttgctccgcaaatgaagcttgaatggaaacccccctctttctgccactatacccagggataaaagttaacgggtgctgcaggcagatcagcaaaggagaagacattgaaggatgcaatatttgtattgatttacccggtgaggatccctggtcaactaaagcacataagcgaggggaattaggaaggattagcataggcgagaaagtcataaatatgagctttgtcatgtgacttaaggcagaaatgaaggctatggcctttactttattttttatttgttttctgctaaaatgttaagatgtatcttttcttattaatatctgtaaggtatataaatggttgttaaacttcctattgtgttcagaggtggcagagtatcaaaacagaaggattatgataaaacctgaagaagaagggacattttccagagatcctagactttattttattttttattttttttgagacagagtcttgctctgtcacccaggctggagtgctgtggcaccatctcagttcactgcaacatctgcctcttgggttcaagtgattctcctgcctcagcctcccgaatagcttggactacacatgcctgccactatgcctggctactttttgtatttttagtagagacagggtttcgccacgttggccaggctggtcttgaactcctgacttcaagtgatctgcccagctctgcctgccaaagtgctgggattatagctgtgagcctctgcgcccggccagatcctacgctttaaagctggacacagcattgggttttcatcttttaaaggagggagggaggtattgtgtttttggccaaccacgaagtggttatttaaatgcagctcctccaagatctttttttttttttttaaattttgagacagagttttactcttcttgcccaggctggagtgcaatggtgtgatctcagttcactgcaacctccgcctcctgggttcaagcgattctcctgcctcagcttcctgagtaactgggactacaggcatgtaccaccacacccggctaattttttgtatttttagtagataccaggtttc[132 bp omitted]gtgtgtgtgtaaaaattgctgtgtgtgtgtgtgtgtgcacatgtgcgcacatgcatgtaaagtggtaagccaaagacaaatgtagtgaatgtctggttatggcccacccaatatcctcctcccttcttctgccaacagcatttgggggaaattgccgatccccaactctacattgtcctgagggagctgccagtcacagcccaggacagtaactaaccctcttcaccttcaggctcagtgatctgaagactaagtcaccattgtccagggcctggagtggctgagaggtgtggctgtgtcccagaggactggctctccactaagattagactgaatgacccactctgaggccagggatgcagtgggaacccggtgtctcattcagaggcagccagcttggacaaagcataatttataatgttctgcataaatattttatgcagtttctggttaccttctagaaattaagaaatcaaaccctttctgaatgaaatagaagtcagctttattctaaagattcattttaaatattggaaaattccccaagaaatgcacttttggccactaaggaaaacagtataatggttcattaaaaaaattaaaaatagaattaccatgtgatccaccaattccacttctgggtatatgtccaagagcactgatagtggggtcttgaggagatatttgcaaacccatgttcattgtgacattatttacaacagccagaaggtggaaacaacccaagtgtccactgacagatgaaaggctaaaccaaataagatatatgcataaactggaatattattcagacataaagaggaaagaaattttggctgggcgtggtggctcacgcttgtaatcccagcactctgggaggctgaggcgggtggatcacctgaggtcaggagttcgagaccagcctggctaacatggtaaaaccccatttctactaaaaatacaaaaaattagacaggagtggtggcgggtgcctgtaatcccagctactcgggaggctgaggcaggagagtcacttgaacctgggagatggaagttgcagtgagccgagatcaagccactgcactccaacttgggcaacaagagtgaaactccctctcaaaaaaaaaaaaggaaagaaattttgacacctgctacacaacatggatgaaactgttaccatgctaagtgaaataagctattcacaaaaggacacatactgtatgattccacttatatgcggtccctaaagtaaattcagagacaaaaagtggaaaggtggttgtcaaaggggagagaggatggggagtgagtgtttaatgggtacagagtttcaattttgcaagatgaaaagtgttctggagacggatggtggtgagggtggcacagcagcgtgaatgtacttaataccagagaactgtatatttaaaaattgtcacaatggtaaattttat[138 bp omitted]atggtgaaaccccgtctctactaaaaatagaaaaaattattcaggtgtggtggcacatgtttgtaatcccagctactcgggaggctgaggcagatgaaccacttgaacccaggaggcggaggttgcagtgacctgaggttgtgccattgcactccagcctgggcgacaagagcgaaactccagctcaaaaaaacaaaacaaagcaaaaggaaaaaagaaatgcagttttgtaattttcaaagatctatggtactatggtcagaaagtttgtaaagggcagagggacttaaactaagggacagattttctaggaaattgggattggcatgaaggtttaaagttgatgatgctgagttggttttaaacaccttatgaaatctgtgtatcgggcttaagctctgatcctgctcagtgaggctgatgtttgcagagaacactgggccgtctcctgctctgtttctgttccgaatcacacacgctgaaccttttgcctgcccacaacaatgctgggatccttggacccacagggctttctgctttgggcgaggcctttggggagtgggcaacaccattctatgtaacagggctgcgtgttctaagctcctcccctctagggcagggtgagggtggactgtaggcaattgggcctttgacctggctgtgcctgtgtgggcactgtgggaagtgcctggggagccactttgagcagcagcaacctgtttttctccctttacagcatttctggctttgtctcccacttccagtgtgggctattatggaagctggacttgaaggaccaacttggctatcagcttgcggggtgaccataccaagtcctttatcccagtgggccttgccttcttgtttatacaatgggtgagagcagtgaatctaatctcgtataaaccagagcaggggcagtgcagatggtggggagaggatgaagagcgggaaccagtggaagtagaattaaataccatggatgtgactctcatttcacaaatgcaggaacaaaacgaatattacaattcttaattttattctacatcgacctaagtctgagtccgtatctcaccaggagggtgggagagtcagcttcattcatcgacaggctcctcatcctccccatttcttgggctccgtgaagatttcaggagtttaaggggtacccggaaagtagtctaggtgtttaatttctatgccattacgggcattgttacagaatcctcatttcccagtgtggtccctggaagtccagcagctttctgattcccttgggggctgagaattttttgccacggctgggaaattttagcatccaactttgcaaggacagcatgcaggaggaggagcaggggaggaggagtcctccccaggacacgcctagcacatgggacacagctcccagctactctagaatcgccaaggtctttcctatttccagtctggtagaaaccagccccaaacctcttgtcacttcccgaagccattctttccttccctctcagaaatatcaagcataacctcatcaaacagttgaggatttcacaaaagtctggaaaacctttgagttcaggcagtttctgtattctgccaggccaaaaaaaaaaaaaaaaaaaaattgtctctaagacagggaattgcagaagaaaaaaaaaaaaagaaagaaaagaaaaggattatgggcctgaaactgggatagagagaaatacagagagaatgacacgaattcatatctcaggtaagttttttccagtctgcgtgagctcttcgcagatcatgatgagcctaacaaaaagagagaaagagtagtgtagaaaatatcagagcatctcccacatggcaagtgtgtgggttgtttcatacatttagaggagtgttctgagctggtcatagctgaagaagtttatcctgccggagatgaaaggggtggggcaggcatctgtatgaaaaacaaaactccaggtgaatctaatgtgccgctaaggctgcaaacccctggtttagacactgatcagacgagagtgtgtggggaaccgaaatgttggtatttttagcctgcctagagccattcagcaaaaaacagagactataatggaggtggaggcaggtggtgagggcagataatgagttcgaagggggatatgtgtttatcagagcacagtggaaatacgtggaaagcattgctgtccctctaaagatctgcaaagcgcagctgtgctggatgctgggtggggaaggagccatcaggggaagctttgacctctaaagggacaggaagagcagtcaagagaagccccgggacaggtctctctcgtgtttcagacgcaggcgaaacagctgaattcagggcttgaatttctctccttggctttgtcaacctaaatttcggacatctgaaacagcactgccagccgtcatctgctcccaccgttcacctggaagcttatctttgctcctgcattgatttctctctgtcagctcatcatgaagacagatgctttggggcactcaacattgggtgttctttgcggaagatgttctgccttgcgaggccggacggctccctgaaggggctgtatctggttcagataagataagaagcttcttgattcagcggaggaacagctgaaatcaacagcatgtcttgactgtgattagtgagaaggagttggggatgggggtggaagtgattcacttggaaaaggaacgattatttctgaagatgagtttgaacttgctgatgtgtccacagctggtggcgttgagataccagggatagatggactctttgctctttgcagaagctgagttcttagggagtaggaaaagttcactttctgaaaatagaccagctgtgctaacagtgattgctttatccattagggttctttccatttccagtgacagaaaatccagaccaaacatattcaacaaagaagcacaaatgtatcgtcatataatcgcagtgtcagagttaggcatggccatgggctgagcgtgttgtgggtgggttacggctcagggcctccccggcagtctttcgtgactgagctcaagaaggctgcatggaggctgtggctgtgagaagcacagactgaggatcccagtttcaaattctgcctttgccactcatgagctggctaacacgggggcaggtcctttagttgcattgaccctcggttgtgttatctataaaatagggacagtgctgttggcaggataaatgagagatggcatggaaagccgtctgcacacagctggagctcatgaaatgttagtaattgtagaggataatggttgttttcctcttcagcacccacacacctccttctgcctggtctcctggcaacagtttcaattctgtttatgggttgcccctccctcggtctcagtcacataccaggatggagcatacaacccagcctaatgctagttagtacgccgcattatctgggccttcgtgattggctcatggatgtctcctgaccgaagcttgtcccatcagagagaacatcatgattttgctgtgactgtcaggacaaagatgtggaagcatttcctcctgcccactggatttgagcctagaagtataagtccccaggagcttctaatggtcatttttcagccacaagggaagtgctcaagtgagaaagaaatccacacagagagaaaaatgaagacatgaagagagagacagagaagttgctggtgacgtaattcaaacccttgatcagcccgtgcctgatgcttgcttcagactctttggttatatggcaatcaattttcttttttgtcttaatgagtttattctggattgtctgtcacttgcaactgaaaacaataaacttgatttgagatatatttactggaagcataaaagagattcttcaaaaagcccaaggctcttttcctcattcctgtttggcagctaagaaattaggtcccaattgttgcatgtgactaattcctcccttctgtgcatgaggcttcttgtaccttgtgtgggtttgctgaaagtaaaagaaactgttccaaccacctgtcacttcaaaagagattaactacctttgcctaaaagaacctctgctaccacgggaaaattatacttatgagccatacggagggtcccagctgctcggctgccatcccaggtcaccctttcatcacatccctggaatgaacaaggttctctttgtggccattgctgcccaggcatcctggatccctccaaagcgcaggcaggaaagaggctcagaggctgcgaggtactggccttggtccttagtgttgcgtctgactcggtctcattgtggcttggtttgatggtttctgagtacaggaggctgacattcaagatgatcccttgctactcggccattgttcagtctaaagaagatacccctttgctcctccaaaatggagagggaggctgtgcccccagccacctgctggactgcaaacatacaagaaagattgggcttgattgccacccaagttgcacgtctgactggcgtcacaaatggaatggaaatgaggacactactcgggagtggacataagcaaggacagtccatgggcgtttggggtaacagcagtctcttccctcttgtctctgagaaactgccctttatgttgttagggctgagaagcagagctgttgttctgtctgcagaaacccactgcttaaggccaaaggaaggatggaagtgctctgctggccattctgaaggctagggccaggtgtgtgtgtgagcaggtatgtgggatgttcacagtgtgcactgggaaaggcttttgggattgc[143 bp omitted]tactaaaaacacaaaaaattagccaagcccggtggcacatgcctgtagtcccagctactcaggaggctgaggcaggagaatggcttgaacgcgggagggggaggttgcagtgagccgagatcgcaccactgcactccagcctgggtgacaaagtgagactccatcttgaaaaaaaacaaaaagaaatcactatttgaaacttcacttccttatatcaaaacatatgggttcatgtccttattttgggggtgctaaaaacaaagataacttaggcatgtgagagttatgtgctggctttctacacattttcccctcactgctattcaaactattgtgggtctcagtgggtccatatttccatagcacagccaggtctctgcaggtcaggaaacatgcaggccttagcctcccaaatagatgatttattccataatttgcataacagggataatattctttattattaagtattgtatttttgtccttagtaattgatacggtttggctatgtccccacccaaatctcattttgaattcccacatgttatgagagggacccagtgggaggtaattgaatcatgggggcaagcatggaaatgctgttcccatgatagtgaataagtctcacaagatctgatggttttaaaaagaggagttcccctgcacaagctgtctctctttgtctgctgccatccgtgtaagacatgacttgctcctccttgccttccaccatgattgtgaggctaccccagccacatgaaactgtaaatccagttaaacctctttctttggtaaattactcagtctcgggtaagtctttatcagcagcatgaaaacgaactaatacagtaattcctagtttgagttgtctcagagtttgtgtattaagagagccaggcctggtgagtcagctcatagagtttctttggtagtatggaagggattcctcttcttcaatcaggctactgcctaggaagaagaggatttgatggaagggaagcctttgcccatgagaaaagaagctgaaactcatcccttccatcctggagaagggtggagaggagaaggatggagggggagcaaggagatcaaatgccagagtctttgtgccctttcaggcacatgcacctaacctggcaatgctgaagaaagattcatagagatcagagagcttaaaaagatgaagtggggggactattcccctgggcacagtcagaggggtgatctagttctgaaggcatagcccagtctctggctcagagataggccactgtagactaggaaggagggtacagctttggctgtgagtgagccctgatagaagagcctggggaggtgccctgggcccccatggcctgtgagtgctgtgtgtgctgtgcagggagccagaagctcaggagatacagaggacacttcaatgcatggcatgaggatgaagccccagagtgtgcatggcttgaaccctggactccaaggaagtgtcaacatgaccccctgtccctccagtggatgagacagtgtggctggccactctgtgacagagatcaagaccagaagcccccttattttctcagccacaagggcacaagagcccccagacactcaggcaccatctcagagagaaacagaggtagagggaagaaatctgagagacaaagattgtatctgaaagggactgagttattcagaagagaccatcaagctgtcagaaaccaagatactattgattggaaagtttaaggtttgtccattccgttccccctacaccttctgccctttgttagctggagggatggaggatggtgaggaagattagatcagttgtagagaaagaaataaagctgcatttttcatggcaattccctttgaatattcccctttaaaagcgtactccatggtgcaaatgccagatgctaagttatgtcaatccagagatcatattattaggatttaagtaatgttagtgtttctcagtcattcagaagggctggagccaagacatcaggtgtgtccacattcctgtcctagcactcagaggtatgctcccaagaggtcacaagaagataaaaccactagataaaaccccaaatagatgctcttcatatctacttatgggatattggttgttacggtggttgccaagagattaaactggaatgaaactgtaagagaacttacctacaaaactctttcaaaatttattccttttgaaatgctggtcttgaatcatcatgttacttccttccatgatagcagtggtcactctgaagtcaacacaggcacagagacctctgtttttacaacattttctcagaattccaggcaaccatagtcagcctggaggccaatgggggaccctggtaatgatgacacctttttttttttgagaaggagtttcgctcttgttgcccaagctggagtacaatggtgtgatcttggctcactgcaacttctgcctcgtaggttcaagcgattctcctgcctcagcctcctgagtagctgggattacaggtgcccatcatcatgcctgggtattttttttgtatttttggtggagatggggtttcaccatgttggccagctggtctcaaactctacacctcaggtgatccacctgcctcagcctcccaaagtactgggattacaggtgtgagccaccgcgcctggccacgacgacacttttgatttccagttcatacttccaaagctgcattcgttctttttgcatcaaactaggtgccagtggttagctgcacttgacaattattactgtggttataaatggacaggtgttttgaccatcagcaatacctggcaggtcagggggatactttattagtattttgtctcacataatccttacatcaactctgggatatgcgttccactatccttatttcacagtttagaaaactgaagcttaaacttatttaatttatgtgtgatggaggctggatttgaacccagatgtattagttatctgttgcccaaaacttagcagcttaagacaataaacatgttatcctgtagtttctgtgggccaggaactcaggaatggtgtaggttggttgtggctgagggtctttcatgaggtttcaatcaagaggttggttggggctgcagttatccgaagacttgactggggctataggatctgcttcccagatggctcactcacatggctattgactgtaagccttagttccccactggctgttggaaggagggcttcagttccttatcatagggttgcttgagtgtccttgcgacatgggagctggcttcctttagagtgagtaatataagagagatagcaaagaagaagctattatgtcacttatgactttgtttggaaagttatacaccagcagttctgccatattgtattcattcattcattcattcataggtatccagccgacattcaaggggaagggatttaggctgctttttgaagggagaagtgttgaaaaaattgatggacctattttaaaaacagcacacagattgtctgactccagaatctgcattcttttcaaagatgctatacttttactcacaggtagacatgcaaactgtccactgccctttcctatacacatcctactctataccccacccctcaagaagtctttcttcccctcctggggttgatgagtctctgtgaagactgagtcccattgccttatcctcattagcatcaccctttactgctctgggtgctaatgccatgccttcgattttaccaaagatcacagaagtgtgaaatatacttctgcatgtattgtcaaactgtcataaaacccttagctttatttgtactacagtgatctagtgagctgatcctactttttacatctatagcagaaacggtacaggagctcactctgatctctctgaccttatgatgttccaaataaaggtacagagtctacaagaaacccctgaaatatttcctgaatccttccacccacacttccatccttcattctgcccactgcttccagagttctttctaaaatccagatataatcaagtcacattttgccccaaagcttttaataactcccaatttctgttaagatgatttcaactctggctttgagatccttcaccaccaggcccctgcgtgcctctcccttctcatctcctcatcactctccaggcaaactggactatttgctattctgggaatgtgtcttcttcttttaagcctcagcccctttgcatgttctgttcattctttctggaatgagcttctcccctttgaactgttgtcaaattccttcaaagtccagttcaaacactgccttctcatgaagttcttacataccactcacacctttctctgcatgttagccaagaaaatatatgcagatgaaggtgtctgcttgaatcatggcagctacctgctggcttaactgggttaacactaatgaaaatcacgggacagctaaatttaatttttgacacctgataaatgccaaacatcaatggatttttcattaacatactgaagagcagtgtcttcaagtcactgttatgaagacactttcctaatttctttgaggtggttaatcttctgtgcagacatcagaaaggattgcatttcctgactcttttggctcttgtcatgtcagttgtgtaaaatgatttgaaaagaggtgattactatggaccatgacatccatttcacctttatcaggaaatacataagtgagatagtgcaggtgttgtgggcaggggtaggtcactctcctcccctgcacccttctcttctgagcagatccagaaggaagtgtttgttttggatgttggaccctgttccagttccatgatcatatttatgttgcttctgagtttccaaaacgatgtatgttgaatttgtcaggtcatatttttgcagcaataaagggtggtcttgttgaagtcaactcaatcccaatgggccttatatttgtgacattccagagtgaggataacatatggaaagaagcccacaaagtaataaggaacaaagaatcctgaatatgaaaaaccaccctgatgctgattctggttgcctctccttgccacggtccttcctggactggagttcagccagcagatgcatattatattggatgcttcctctaaagagacaggaggagtaagtgggaatacgggaggcactcagaaagtgagtattcacacactgaaagaaaagcaatcaaggcatcggcagccctgttcagaacaagccaagcggggacggcgcaaacccgagggtggcttggggttgtgttaacagatggtggagagaaggcagaatgcttcacctcccatttggctcctgtcacccgactgagaagactaatcttcccctgtaaaaggatagcacaatcactttattcagaggaaattgcagaatgcgatgtgagaggcatttggacaagagcctaatctctgggtgttttgctgaaggataggtaatttaaagttctgcaggcagcaaagggttaatccagtttttgtccaagagcaaggagttagagtacagagtgtttattgctgttaccatgttcattcatttgttcattcgttctacaaacttttttttttttttttttttttgtctatacgatcccagggtggtgtaccggggaggctgacctgggttcaaatatctgctgcaatgtattaatatctgtagacaagtcacaactcctctctgttattgtcaaagacctttggatttcaaggaactgagactcagtcaagctcactcaggaagaggagtgagttggtcgagaaaacagaatccacaataggtatttcattcttattttttttttctgtctttgctacttgaatcagaacagtaggtatttcaaacagaggagatttaatgtaggaagttggttacatgcatatggaaaaattgaaaaaagcaaaaagggaggtagcctggagatcagtaactgcaggaagcagtgacctccctactgctggagaaacaaatgggacgaagtggcattgccagaatctagaagcttggagaagggttgctgagagggtagatttacatccactagctccactgcttcccatcaatagtcttggtctttcagttacatttgtgagcagaggtaatttcagataatataacaaatagagtgatgggatatagggttatgagggttggggtaaggccaggggtcgggaggtttttgtggcagagcttggagaggactgctgaatttggatcatttatgagttgacaataaactcaagaagggcaagagcagagcaggatgagaattacatgacctttacaataatccaagtgtacagtttttatattgccacataataaatcaccacacatttagcggcataaaacaacctatgtttatgatctcacggtgtccatggctcaggagtctggatgtggcccagctgggacctatgcttcaggtctcacaatgctttggtcaaggtgtcagcttgaccaaggtggtcaaggtgtcagactctcatctgagtctggggatctctatcagccacagatcccacccacactcacatggagggggagtgtgcacactgggggcaggaatctcagaagccatattagaattctgcctaccacaccaggcaagagatgatgctggcttgaactcaaagtgtaggcatggagatgggagaagtggttgcattcaaaatataattttaaagtcctggctcagaggactgcctttggagagggaggggactccaactctaataatctatgtggggtggagggtactttcaatgaagtggggtactcctggcatgggagcaacctggttgtattgcttgggggcatgagtgcttcagataagaggaccctagatggggatggggctccaaataatgcataaacacacctgcaggtgaaagttagctctaattaactgccaggctcagatggcggcaagccacccagctcataaaaagctgttttactccttactcctcccgccaccacaattttcactctagcagggtttgaaacagcggctagcaagtagggggaggaagagaggagagcagagagagagttggagatgactatgtcccgtcctcaaagacaggggctccagacacaagtctaggtatgaaggaaagggagaagtctttgagtagagattgaagcactaattaatagattgggctggacacattcatatgattgaatctaatagtgttttatgatggaaaatgaccataggactgtcccttgcctgagagtacacagagaagtttagtatgagtttctatccagggatgggtgaggatgaccactactgaatacatggtttttttttttttgagacaaagtttcactcttgttgcccaggctggagtacaacagtgtgatcttggctcactgcaacctccacctcctgggttcaagtgattctcctgcctcagcctcccaagtagctgggattacaggcatgcgcctccacgcttggctaatttttgtattttttagtaaagacggggtttcactatgttggccaggttggtctcgaactcctgacctcaggtgatctgcctgccttgacctctcaaagggctgggattacaggcatgagttacctcgcccaatctgaatatattttaaaggtgcatggttatcaaaaaattaagttgcatcttgatcacatcttacatactgtgcttgttcaatggattggttatgcaaaagtctgggtgaagatttttcttggcagagtgaccatcaaatgcaagggcattgggtgggcatgatgttgatatctctgagaaacctcactagagtaagaggagggtaaaaggggtgaagctggctgggtgcagtggctcctgcctgtaatcccagcactttgggaggccaaggtggctggatcacctgaggtcaggagttcgagaccagcctgaccaataagaggaaaccaccctgtctctactaaaaatagaaaaaattagctgggtgtggtggcatgtgcctctaatctcagttgcttgggaggccgagacaggagaatttcttgaaccctggaggcagaggttgcagtgagctgagattgcgccactgcactccagcctggggaacaaagagcgaaatttcgtcgcaaaaaaaaaaaaggggggtgaagccaaaggggtgacaggggctggcagatcatggtgaagagtgtggattttcttctaattgtactgagatgtcattggaaggttttaagcaggggagtgacaaggtctaatttatataccaggtgctgtgctgccggctggaattctttccccacttttatggttgtccttcaacctgctgggattgtccatggagttttatagccccaactaccccaccacctcacaaaccccttctagttacccaagctcaataatagaccagttaatgagagtaagcctgatctccccagctggtgggaatcatatgaggataggtgcataagttagaagcagctgcacaagggtgagacaggaggaatctaggtcttcttgatgtgatgtgacatcaatttttctccatgctgagtgatgcctagcagatccaatcaaatcctctctttggggaggcttaatgtgggctgaacaatgactaggcagcttgcttgaccagagatcctgaggtcaccagatacacatccctggcttgggacaactgggaccccatgcaccctgggctactttcctgcaaaagcacagtgtttcttgagtgacccacatcatacctgagggctctcttctctgaggctgggggtggattgcagaaggattgggcccaacttctccattgttatgcatttctctttgtgggtgtggtggagtatcttattttctcaaggtcccattgggatccaaattcccattccaattgggaacccagtctcattgccatctcacctcctgttcctgtcctctttcttctgcttaacactgataaaacatgaagttcagtgccttttccagaatttcttcactcctcaaaaagcacctccacatgcaaggtatggtgaatgtagcgtattttgttgagagcatggggttggcagatgaagcctacagtatcatcacttggcttcatgcatatctcaacttctgctttctcaagtctccttgcgtgggcactaccccttctctaaatccagttctcctctcccactttatcatgcacaaaatgtaactctctaccttctacttagcttccgtttattatctaaggctcattagtgtctctactatcacagactctagtggaagagaacagcatggagctttattattccattatcttttagaagttacaagtggctgaatttagtctcgttttaaactatattacctcctttcattataataacttcctatttctttctttttttttgagacagagtctcactctgttgcccaggctggagtgcagtggtgtgatcttggctcactgcaacctccgcctcttgggttcaggtgattctcctgcctcagcctcctgagtagctgggattataggcatgcaccaccatgcctggctaactttttgtatttttagtagagacagggtctca[142 bp omitted]gaaggaacacaacgtgtaaggatactgaggttcagataatgtgacaggttgtattttctgaagatggccacaaagatatctcccatttcacatgctcttctagaccttgccactcccccagcaagaggcaggatctatgtctcctcccattgaagctgggtggcccttggtgacagcctcaaccaacagaggatggcagagtggtgctatgtgattttagaggctaggtcataaagatgcatgcactccctgcttgttctcttggtatgttcattcgtggaacttgcttaccatgaggaaccccaagcagggcatgcaaagacctgcaggacaagcaactgaggctcctggcccaaagccctgctgaactcccagccatccatcagccagcaaccacttgccagccatgcctgtgaaccatttgaaataaattcccatccttcatctataaggggcagagatgagccatccctgctgagccctgtcccgattgcagattcatgaactaaactgttactgttttaagccctttcaagtagtttgaaaaacagcaatggataactgatacaaataagtaaggtaacttgtgtaagatcataaagtgtaatttccagagctgggactcaaaccaatgtctttctggccccaagtctgtgctcttaccactgtgcctaataataaaatgttcagcccagtgcctggaacaaagtaaatgatcaataaaatatttcctcccatctctcctttttctcctagggtctcatagtagaacatgtttctctgacccagtcagtcttgccagaggtggccacattccagcagagatgcttcctcttgcaaaacccacctaatcttaggtgaggctgcatcttcttgagtgtagggagaagattagcccaagtcaaacagtgctgcttctttacctcagcattattgaactagaaaagcatttgccaacatgcactttgtctctggctgcccctgaggctcgagaaggaagccctgccctctgaaggtgcatccaggcattcacatcagcggtcagaggagagctgaattctaggccctgctggtggggttgggcaatgaggatccccccaagggggctcaagttgctttttagcctacgtgggagtttcagacaaaggattttcttcctcctcttcctatagggttcactgagatagaatgacatttaataacagtggaataggagttaggatctgaaactatgctcatggcaggcgtgacctactggggctgttcagagcatctttcttctgagcgctcactctccagaccttgctctgttgatctgaattttgctttcaggggcttggtgaggacgatgtgccaagtgaatgaattggatggacccaggaggcgggcactctctcccactccaactggccacctcatccccagcagtcacaaaccaacccttagcaggtcacctccctaaacttctgcatatgcctttagcctgggcactgtgcatgtgaggcattaacgaattcatttattcatttgcttatctatctgcatgtccacccatctatttatccatctatttgctgaggacaatatagcatcgtggtttaggttatgggcttgggatctgtattgtctgggttctgatcctgcgtttgccacctttgagctagttattttcacctttctatgcctcagattctcctctatgaagtgggggaatacagtaataacacctgccttgtagagcttttatgagaattaaatacattattatgtaaagcacttgccctggcacctggttaagtactccgcacacgttacagtgtagttattgtcactgctgttggagtgtgttcaggtctgtgtgagtgttgggggaagcagagcagatggtcttcataagttttaagcaaaggtgctaagaaaacacaaagtttacttttctacttccaggtggcttaaattcccaaggaaaacaagatactgccttcttggctgtttttgtttttgttgttgtttttgtttttttgtttgtttgttttttgggatagggtcttactctttcacccaggctgcggtgcagtggtgtgatctcagctcactgcagcctccacctcctgggttcaagcgattctcctgcctcagcctcccaagtagctgggattacaggtgcacaccaccacactcagctaatttttgtattattattattattttttagcagagatgaggctttgccatgttggccagattggtctcaaactcccgacttcaggtggtcctcccgcctcagcctcccaaaatgctgggattacaggtgtaagccaccgcacctggccgaggctgttttaagatgggttaatgatgtgtcacgtgccagagccatgtgctcataaacattatatcattcctttaatcccccaaatttctttgaggtaagctaggaatattctcatttcagagaggaagagagaggtgttacttttccaaagtttcctggctgaaagtgagaatcacacccggatctgtctggtttgcaggaagggccgcatccaccccaccctgagctcctccacagtgcgatcctgggactgcctgagaggcagcacagccagctcacattccgggacacctcacaggtgccgaactccaccagtttgaaaatggttccgaagccactgtgaagccacttggtctccagggtaccagggcactttccaaccagcaccttcctcctgtgaatccaagcgtcagggctaaggaaaactgcgggtttgattagctttcaagaacatactttatatcatttcctctcctcatttgaactataaaaaggagctttctagtttgaatagcaacttcaactttctgccttattctgtaagaaaggaaagcattcagtcagaaatgggggtgatttcatcagcacttttcaatttcaaatgagtttgcgaaagctggtggcttcctttggtggtcaggctatgtttggtgtccaggagctgtaaaagttgggtcagactggctcacaggggacaaacacgtgtggggggtggggaatggcacaaggagagttttctgcttctggaggggagagattgatgggcagaaatgagcagagcctctgggctatgggccagtttctctttttttttttttgagacggagtctcgctctgtcacgcaggctggagtgcactggtgtgattttggcttactccagcctccacctcccacgttcaagtgattctcctgcctcagcctcctgagtagctggggttacaggcacctgccaccatgcctggctaatttttgtatttttagtagagacagggtttcaccatattgaccaggctggtcttgaactcctgacctcaggtgattcacctgcctcggcctcccaaagtgctaggattacaggcatgagccactgcacctggcctaggccagtttctgaatcttctgcccttcatgggtgagtcgtgttgaggtggcctcttaacctggcactaggttgggcagatgcacctcatcaaagatgagtttgggaagctgaatatcagctttagaatgcaggtcttttctgtttcttctgccacagtgaagttgtcccagttgaggtcagagagagagagaaaggtcactgatgtggtcagatttcttagagcagagccaagttttttttttttttttttcagacagagtttcgctcttgttgcccaggctagagtgcaatgctgtgatcttggctcgctacaacctctgcctcctgagttcaagcaattctcctgcctcagcctcccgagtagctgggattataggcatgcaccaccacacctggctaattttgtatttttattagagacggggtttctccatgttggccaggctggttttgaactcctgacctcaggtgatccacccaccttggcctcccaaagtgttgggattacaggcgtgagccaccacgcccggcccgagcagagccaagtttaaagatccaaaccagggcttagcaaattctgtagcaggtcagagagtaaatatttttggctttgcaggtcagaccacatctgtggcaactgctcagctctgccattgtagcatgaaagcggctgtagataatatgtaaatgaatgagcatggctgtgttacagtaaatttttattggatactttatagatgctgaaatttgaatttcatgtaattttcacatcatgaaatatcactcatcttttaattgttttcctccaaccatttagaaatgtacaaaccatcttaatatgtcatacgaacgtaggtggtgggttggattttattcacagctggcagttttcaagatccctgctctaaatgtcaaaggggctgctggtaccctggggtgggaggtggccacagagggtaccagagcagctttcacaggggatggggcaggaggggctcagggtagcagtggagggtggcttctatacagcctagctgtgggcattttcttcttagtggtgggagagagaaagagagagagacttttctgaaatcagacagacggttcttctcaaaaaccatttgccgatgtccccttgggtgtcaggaaatctctacatactgggaacgggggaattttttttttttaaagtgcaatttcttttcttgccaaaaggcaactcaattgtcaggtgttggttgcccctcctgttacatgatcctctaaaagatgtgaaggactttatccagtctatcattgatgggcatttgggttggttccaagtctttgctatggtaaatagtgctgcaataaacatacatgtagatgtgtatgtgtctttatagtagaatgatttataatcctttgggtatatacgcagtaatgggattgctgtatcaaatagtatttctggctctagatccttggcacatatacaccatgaaatactatgcagccataaaaataatgagttgatgtactttgcagggacatggatgaagctggaagccatcattctcagcaaactaacccaggaacagaaaaccaaacaccgcatgttctcactcataagtgggagttgaacaatgagaactgagaacacatggacacagggaaggaacattatacaccgggagctgtcaggtggtggggagctaggggagggagagtgttaggacaaatacctaatgcatgcggggcttaaaacctagataatgtgttgacaggtgcagcacaccaccatggcacatgtatacctttgtaccaaacctgcatgttctgcacgtgtgtcccagaacttaaagttaaaaaaaaaaatcgtgaaggactaattggctggaactcccaccacatgccgggagaaaccccagtgcccatctccaaatctctggggactcttgaagggattacatgtctcctacgtgcttttggttctgctttctgccttgactcacttacatcctatgccacatcagttcgcagtggcaacagagattccttcccccacttctccagaatgcagatcaccaggaagggttcagtgtggtaggatttgctgaaaatttgtggttaaaaatcctttggcccttctatccaccaggatttccttctgatcatcatcctccgcagtacccttcctcacccaaatccttctttctggaagttattatgttctacagggtagcagacaggaacaccacaccctgtaataaaaagtcagtgtggtcattccgtgagaggtggccagctctggtgggggccatgggagagcaccacggattctgcaaagtggtgagtggactgggaaggtttcccaaaggaggggaagcgagaaggctgttgacttgtgagcaggaagcgggagaggcattggaggcagaggggaaaatgagcaaacgctggtaggacccggagggaggagtctatccttatgaatagattttcacaggtctatttattaaacccatcttttcttttctttcccaaaagaaaagctgcaataggtttctaatccttgcttccttgggccattgaagtattttgaatcaatatcctttagatattaattgtcttgaaatgccagaaacaatgaaataccacatttttatcacaatattaaattatacatattaaaatattttacttctgtagatttgtaaatgaatggtaaacattttctgaatgaagcactagagtcgaacatccatatgtgtttctgtagttaacacttgcaaaaataactctttagatagactcccaaaaagcaatgtcaaaaaacagtattcctatggtggacgtttgtggtaaccttcccaacatccacttttttctttccccaacatccacttttttctttctagaagctgaatttctgtttgggggtccatgtggttcaggggaagttgactgctctgccagctatgatgggggcccatgactggtctacgcttatcaatggattccatgctgctggtcacagttcaggggtgagtgcctgaccggagccagcccaatcagagcaaatagtactcctcttggggatgttgggacaatgacatcctctcttcttctgaatgggccactgtgtggacgagagacccaccagattgctgcagccccaagggaagccagcttgaggatgaaactcagcccagaacatggcagagaaaacaggaccagagtcctgagccaccatgaactactggatcaaactgtgcctgaagcctgcatacctctgggattttcattttgaagggatgataaattatctttagtgtttaaccaagatggaattagattcccattctgaacttagatgactctcaagactggactagatttatatccatcgttttgtggagacttgtgagttcctgaactcagtttgggaactcagctgatggtgcctacagtatcctaatcttggattaattacatcagtaacaatctagatccattaaaatatatttagtgtttgcataaaaagagagattggcagtgcagaagagaatcaaaggcgtggggaaggttttgcatctgctgtgttgagaattcagaagaaaagctccaaccagcagcagctgtggtgtttttagtggaatttggaattagaaccaggcaattttcctgctgggctgtgccaggcaagggttgacagggagggtgttggagctggcttcgtaaacctcaactgggttaacgagggacatgggtttcaggaaaccgactcttcaagggcctgaagaaagtagcaaatccttgttttgtttgtttgtttgtttgtttcatgattctaaaagtagtatgtgagcattttggaaatttcagaaaacagaaaagtataacaaagaaagtagcaaacattagaattcctcaattcaggtattctttaatttttatctatacacattcaatcattctggatatacaattttatatcaaaggtatcttgccctccaaaataatgtctttgtattcacattcattggccgcatagcattttaccatagggattttctatacataaccatttttcttttgttgaatctttaagtaatgtgtcagcccctccctccctcccttccttccttcttccttccttcctttgtttcattcacagatttcagtttttagagcagctttaggttcacagcaaaactgagaggaaggtatagatatttcccatatatgtgctatccccacgtatgcataatgcttccctattatcaacactggtcaccagagtgctagatttgttacaactgatgaacctatattgacacatcgttatcatctaaagtccatagttagcattcgggtccactcttggtttggacaaatttgttttgacacatatccaccattatagtatcacacagagtaagtagtcttactgccctaaaaatcctctatgttcagcctattcattcctccatcctccctaaaacctggcaactgctaatctttttactatttccatagctttgcttttttcagaatgtcatatagtcagaatcatacagtgtgaagcctttttcagattggcttctttcacttagttatatatatttaagtttcctcctatcttttcatggcttgatagctaatcgctttttagtgctgaatatttctttgtctaaatatactaccacggtttagtcagtcacctactaaagagcatcttggttgcttccaagttttggcaattacgaataaagctactacaaacattcatgtgcagggttttttgtggacatacgttttcagttcctttgagcgaataccaaggagtatgattgctagatcatatggtagagtatattcagtttttaaagaaaccaccaagctcttttccaaagtagctgtgccattttgcattgaatgagagttcctgttgttccacatcctcatcagcatttggtgttgtcagtgttctgggatttgtgtaatggtatctaatgggtgtgtaatggtatctaataggcatgtaatggtatctaattgttgtttcaatttgcgtttcccttatgacatatgatgtggagcatcttttcatatgcttatttttcatctgtatatcttcttttgtgatgtatctgttaagatctttgacccgtttttaaatcagattgttttcttatagttgaattttaagagttcttacatattttcgataacagtcctttatcagatatatctttggtaaatattttatctcagtctgtggcttttccttctcttagagtttctttcacacagcaaaaatgttcaagtttaatgaaatccagcttattaattcttcctttcatggtttctgccttggatatatctaaaaatgtcatcaccaaacccaagatcatctagatttttcctatggtattttctaagaatgttttagttttgtgttttatgtttagatctatgatttattttgagataattttcatagaagatgtaaggtctgtagctagattcattttttttttttttgcatgtggatgttcagttgtttctgcaccatttgttggaaagactctttcctccattgtactgcctttgcctctttgtcaaagatgagttggctatatttacacgggtctatttctgggctctctattctgttccattgatctatttgtctattatttcactaataccatactgttttgctactgtagctttatagtatatcctgaagtcagtcgtgttaggcccctaaccttattcttattcaatcttgtatgggctattctgttccttttgcctctccatattaaccttagaattagtttgttgttatccacaaaatactcgtcaggattttgattgggatggaattgaatctatagatcaagttaggaagaatgctcatcttgacaatattgagtctttctatccatgaacgtgagacatctctccatttactcagttctttgacttctttcatcagttttgcagttttctttatttagatcttgttcctatcttgttagatgtgtaaataagtatttctcttgggggatgctaatgtaaatggtgctgtttttaattttatgttccacttacttatagctggtatgtaggaagatgattgacttttatatattagccttgtatcctgcaactttgctataatctcttattagttccaggggcttttttttgtccattcttttggattttctacatagataatcacatcatctgcgttaaaatacagttttatttcttctttcacaatctgtataccttttattgtattttcttgttttattgcattagctaggccttccaggatgatgttaaaaagaagtggtgagaggggacattcttgagttgttcctgatctttttttttttttgagacagagtcttgctctgtcacccaggctggagtgcagtggctgatctcggctcactgcaagctccgcctcccaggttcatgccattctcctgcctcagcctcccgagtagctgggactacaggcgcccgccaccactcccggctaattttttttttctatttttagtagagacagggtttcactg[139 bp omitted]aagtatgatgttacctatagttttttttttaaataaatatttcctgttaagttgaggaagttcccctctattcctaacttactgagattttttttttattatgaatgggtgttgcgttttgtcaaggggttgttatgcatctattgatatgatcacgtgatatttcattagcttattgatgttatggattgtatctgttgatttttcaaatgtcataccagccttgtgtaaatctcacttggttgtggtgtatgtttatttttattttattttattttttgagacagagtctcgctgtcgcccaggctggagtgcagtggcacgatctcggctcactgcaagctccaccccctgggggttcacaccattctcctgcctcagcctcccgagtagctggaactacaggtgcccgccac[184 bp omitted]ctaatatttgttgacgattttggcatctatgtccatgagatactggtacctagttttctttccttgtaatgactgtttagttttgatattagggtaatgctggtctcatagaatgcattaggaagtagtctctttgcttctgtcttgtgaaagagattatggggaattggtgtaatttcctcctcaaatgtttggtagagtttgccggtgaatcagctggggcctgatgctttctgttttggaaagttattaattattgatttaacttatttaatagacataggcctgttcagattgtctatttctttttgtgtgagttttggcagattatgtctttcaagaaatcattccatttcatcttgattatcaaatttgtaggcatagagttgttgttagtactcctttatgatctttttaatgtccataggatctgtagtgattctcttcattcaattctgatattagttatttgtgccctttctcatttttttcttagcctggctagaggcttgttgattttattgaacttttaaagaacaagcttttggtttcattgattttctttattaatttcctgcttttttttaccctttcacttaaattttactaatactcatagaatgttcaaagaaagcaaaatgaaaagagcattgagaattagaagtaacagatggtaaagatacaaaaatatacaaagaatcaggacagtggtcaagtatgaggcaagacaaagataagtcttagaggggacgatcagaaaattcttaatgcctgtccaaggcctagttatgaatcttgatgataattcctatttttttccaattattgctattaaaacttatgacaaatgttttataaagactccatgaaaagccttctagagctgataaatgacttcagtaaagtttcaggatataaaatcaatgtacacaaattaatagcatttatatatatctcagtaacattcaagcagagagacaattcaagaatacccattctctttccaaagccataaaaataaaatacctaggaacacatctaacaaaggaggtgaaagatctctataaggagaactacaaaatactgctgaaagaaataacagataatataaacataggtaaaaacatcccatgtttattgactggaagaatcaatatgattaaaatgtccatactgcccaaagcaatatacagattcaatatcattcctatcaaactaccaatattacttttcacagaattagaaaaaaattctaaaatttatatgaaacaaaaaacgagtcccaatagtcaaagcaattctaagtaaaaagagcaaagccagaggcataattgtacttgacctcaaactatatttcaaggctatcgttaccaaaacagcatggtactggtacaaaaacagacttcctgctttcaatttcatctctaattttattatttttcttctttttcttttttaaatttaaaatttttttaaattctataggttattggggaacaggtggtgtttgattacataagttaagttctttagtggtgatttgtgagattttggtgcacccatcacccaagcagtatacactgcatgctgtttgtagtcttttatccctcatccccttcccaccctttccccgagtccccaaagtccattgtgttattcttatgcctttgcatccccatagcttagctcccacttatgagtgagaacatatgatgtatatttttccattcctgagttagttcactaagaataatagtctccaatctcatccaggtcactgcgaatgccattaattcatttctttttatagctgagtagtattccatcatatatatataccacagtttctttatccactcgttgattgatgggcatttgggttggttccatgtctttgcaattgcgaattgtgctgctataaacatgcatgtgcaagtatctttggtataatgacttcttttcctctgggtagatatccagtagtgggattgctggatcaaatggtagttctacttttagttctttaaggaatccccacactgttttccatagtggttgtactagtttacattcccaccagcagtgtagaaatgttccctgttcattgctggtgcccctcctccacctcaaggccagcactggcaggccgagtcccttccttctcctgcagcctcatctctggctttctcttctgattccctcttccacctttaaggacccttgagatcaggcctacctagctaatccagggtaatcaccccattttaaggtcagctagaactgtggatatctttagagagctattattctgcctatgacggggaataactattacgtagtgatatggtttgggtctgtgtccctgactgaatcgcagagcaaacggtaatccccaatgttgggggtggggcctggtaggaagtgattggatattgggggcagatttcccctttggtgctgttctcacaataaggggtgagttatcctgagatctgattgtttaaaagtgtgtagcactggccgggcatggtggctcacacctataatcccagcactttgggaggccaaggcaggcagatcacctgaggtcaggagttcaagaccagcctggccaacatggtgaaaccctgtctctactgaaaatacaaaaaaaaattagtggggcgtggtggcaggtgcctgtaattccagctacttgggaggctgaggcaggagaatcacttgaacctgggaggtggaggttgcagtgagctgagatcagccctggtgacagagtgagattccatcccccccgccaaaaaaaaattccctctaaacactgctttagctgtgtcccagatattctggtatgttgtatctttgttctcactggtttcaaagaacttatttattcctgccttaattttgttatttacccagtagtcattcaggagcaggttgttcagtttccatgtagttgtgcagttttgagtgagtttcttaatcccaagttccaatttgattgtactgtgatctgatagactgtttgttatgatttccattcttttgcatttgctgaggagtgttttacttccaattatgtggtcaattttagaataagtgtgatgcgatgctgaaaagaatgtatattctgttgatttggggtggagagttctgtgtatacccaaaggattataaatcattctactataaagacacatgcacatgtatgtttattgcagcactgttcacaatagcaaagacttggaaccaacacaaatgcccatcaatgatagactggataaagaaaatgtggcatatatacaccatggaatactatgcagccataaaaaaggatgagttcatgtactttgcagggacatggatgaagctggaaaccatcattctcagcaaactaacacaagaacagaaaaccaaactctgcatgttctcactcataagtgggaattgaacaatgggaacacatggacacagggaggggaatatcacacaccagggcctgccagggggtggggggctaggggagggagagcattaggagaaatacctaacgtagatgacgggttgatgggtgcagcaaaacaccatggcacgtgtatacctatgtaacaaacctgcacgttctgcacatgtatcccagaacttaaagtataataataaaaaaaaaattttaagtgtgtagcacctgcttgctctctcttttcctcctgagccagccatgtaggacatatctacttcccctgtaccttctgccatgattgaaagtttcctgggacctccccagccgtgattcctgtacagcctgtgaaaccatgagccaattaaacctcttttctttataaagtaccgagtctcaggcatgtctttatagcaatgtgagaatggactaatagacataggaaagagaaaaagacaaatatacacttagaagaaataagacaaggtatttgatagatcagtaaggtgactatagtcaacatccatccattgtacatttcaaaatagctagaagaggatagttcaaatgttcttagcctaaagataactaagttaatggatattccaattaccctaatttgattatatgaatgaattaaattatcatatgtaccctgaaaatatgtacatctaatatgtaccaataaaaaataaactaaagtaaggagtcacaataaaagaaaaaagggccgggcgtgctgtaatcccagcactttgggggcccaggcgggtgaatcacctgaggtcaggagttcaagaccatcctggccaagacagtaaatcctatctctaataaaaatacaaaattatctaggcgtggtggcgcactctggtaatcccagctactcaggaggctgaggcaggagaattgcttgaacccgggatgtggaggttgtggtgagtggagattgtgccattgcattccagcctgggcaataagagtgaaactctatctcaaaaaaataaaataaaataaaaatcaaatgaaaaccatttctaccgcagttgaacccagacagtgagaagtgatggagtttgggagggagggtgccacaaataatgatgtcattaggagaagagtgcacctatcgggggtaactttagctgacacccctagggttctagggacctggtgcttcttccgccaaccctagtcaagtcactggaagtaataaaccgtgcaggggcttacctactgtgtctcttatgtaatccttcctgacattgctgcttagaaggaaatcccaagaatcaggaccacagacagaataggggagtatcagcagcagtagctatgctcatggtgacctcagaaagaattctaagcagtccacaacccctgggacttagccccttcttcctttccctacagttactggagtagaagtcacaagagggtcttagtacagaatgctccagctcagaaagaaggttctcaaatcctcagttgttaatttaccaattcattacagggcaactctcctgtgccccagtataaggcgtttgatagtgagtgagatggtttcctggcctcacacagctcacaactgagtggggggttataggcagtaagttaaattacatgtcggtgtggcaggtgctgcacaaccagtcactgtagagtctgtgggaagcgtgtttactaatcagcccaagttgtatcatttggagttgaataaacaatgcccatgt[131 bp omitted]accccatctctactaaaaatacaaaaaattagctggatgtggtggtgcgtgcctgtagtcccagctacttgggaggctgaggtgggagaatcacttgaacccggcaggcagagattgcagtgagctgagatcatgccattgcactccagcctgggtaacagagcaagacttcgtctaaaaaaaaaaaaaaaagtaaaagaaaaagaaaaaagaaaaggcatactccaagtcctccatcagggctcattgcctctaattacctttgttcccacctgagtgatataccagaggccacccacattattttgatgcacagcccatttccaggaacaaaacccactggagttcaaggtggggcagggtgttcctcaccatggcacctgtttgtccagggtccctgggttgtagggcagcatcagagaccaagggcaggaaccagaatttctaagcagcagcagtggcaggttccctgctgggatttagctggagaacaaagtaagtttgcataatgagtgtgagagctgtaaagaataaactgtgaagtgctgtgcaaatattagctctcctgtctcttccagctctggccttcccttaacagtgtggctgaaagccctttgtctgaggacaaggacagataagctagttagagatggctggagtccacagagcggcaccaggagtctctgaacttgaacttggtctgtcctccctggggcctcttctgacacactcacttgggggcagagaatccaggcccagtgagaaggcagcagaaagaggatgcagaaaaatcagctgtctttgtccttggggtaaccaattcactggggtctccttactcggcagacaagccttattccttcaacagccctgaaaccttcagaggagctgaaagtcagagggaaattagaaattaggcctcatccccacagtgggaacagtccgctcgcagtacggcctccatatggtttaataatttgagatttctcacacgtctcaagggaaggctggaggggttttgatgctcttcctatgggttcccaacgtgcatctcttctcatcaataaaagattgggtttactcactgtggtaagccaaaagtgaaagacaggtgcagctatataatatttctctttaattactgcttatggaaaaaaaaaagccaagtatggaaattaattattccatattgttagaacaggatgaactacttactaattttaactgtggcttttgtgtagaagctgttgctcaacatcttattaatttgggtaaatattaacaaacagtttctgcacctcctcctccactaccctctaccctcccaaccccatcccatacagtacatactcctggggggtgtggtttgcctggggttccttttttccttcgttgtatagtgttgggcccagttgctacaaagcttcctttcaagaagaaaacctttttgatatcagggctgtttttctgcctccctctgctgtctgtcagggtaccctgagactcatgtagaaatgcaagaaaatgcttttctattatttatgcccactttcacacctagcacatttgtcctctcagttggcagacacctgctgtctgaaaggcacccatgcttcaggctagtgacccatggggcagattaacatgtacaagatgggttggggaagactccaaaggcctcactgagtgcgtcttattgactcataaagaatctttacttgaagcctcagcaacagagaagaggaaggaaggtggtggggagtggccttaacacattttcaccgggattcatatggtggggttgaggcttcacccaatctaccttaagttgcagacagaaaagcacaagctcccaaaagcctttctgctggaagctgatggtagtctggagctcttgaagctcatgttcaggcaatctattgctgtaagcaaaatatccaaaacttagtggcttgagacaagtaactaatttactatgtctcataattgcatgggtaaggaattagggcagggctcagctgggtgattcttctgcttcacctgggttagtttggcttggccaagacgactttgcttatatgtctggcctcttgctggggacatctggatgactgaactgagctgggactgttgaccagaggatatacacattgtctcttcagaatagtggtttcagggtagctgaacttctcacacgatggcccaaggcacctcgagagaaggcccagagacccagggagatgatgcaaggcttcttctgatgtaccctcagtagccttagtacatccattccatgtcatcagttggttaagcagatcactaagcccagcccagatttaagaggagggagattagaccccacctgtcatgggaggagtatcaaagaccttgtagtcatctttaatctacccagcatatgattctgctcaggggcttaccaagtcttggagagccaggcggtgatagtaagaggttcatagtctgatgggtttcagtgttgccacttaacagtttaacatttgattttaataactgatcctcagattccttatccatgcaataaaaaaaataactcctaccttataggagtactgagagcattaagtgagatcacatataaaaagcccagactagggtctggcatccagaaggtacattcttcctggagctcttgctgtaaagatgactgctcaatgaggataatcatgtgggaagaataaatgaggttgtacatgtttatcaaaatgtaggtttagtcatgaaaaaatttgagtgacattgtaaaaatagaatagaaaagaaagaccataatttaaaaacatcaaggcttatcagtctcataagggtaggtacgatttttttgaaacttcttttagttttgtaaaaatatttgtgtactggatcatgatgtaaaatgtattgttttgttcttaagatgtagtttttactgaggttcatggttgaaaacatttgaaagctgctgagaaaatgaatatgaagtgcttttgccaactgtgttagtgaactgtcattcaaaagtacaattcttattctgttgggtgtatctgagcacccagggctagtggagattaggagcagcttagtaaatatgctaagtccaccaggatcctggcctcagggatatttgactgtcaaaatcaacaaagtaaaactacctggcaagcccagcatttgtcctggtgccacttttgaatgtcacacatagccccgaaaattggattggtagaaggcagcattataaaatctcactcattctgcctgatcttactctctgcagtgtcttcaggaaaaggagtggttttctctctctggacctgaaggtagttacagagaagaaggagttgagttggatatggatttgggggaagtgaggacaaagaccatcaaagtgggcatgtctgctgaggactcccaccttttcccaataattgttcctctctgattccagccatgtggttcacatgggagctgccctaggtgactctacctctcatgccatatatgactgtgttggcagttgccccgaaatggcaaatcagagttcagagctctttcctgggagtgttttttcccctctctctctctcttcagtttggggccaaagaaagcgtctatcaacgtttccagtggtgggagccctaagaggtaaaatttgagagctgtcaatgtcaaaatttccctgtgatggaggaagcttgtctacagggagagagaacaaagctggcatgccaagagaagcatggagagacagcagaggtgccaggtcatgtgtgagctcctggatacacttgttcatgagcccagctgcacccctaccttggttgcagcatagctgtccaacctcagagtccatgagtcaatccatcccctttggcctgagctcattggagatgggtttctgtcctttgcatccaagagtctttcataaacacttaaatgggagcaacttggtgggaccagaagagacgactctgaacacagtcatttttctagagcctgcatcaggctgggaacagaggctgccacctcctgtctctctcttcctgcccaggtatctgcagggtgcacatccccagagccaagtgaagcatccaggagagaagcaccagccaattcattaggcagctcacacactcgctcctgataggaagagttgagggcaaccagccctccccccacttgagtcctccaggcccctctgtagttaaatgctatgatctccttcacgccaggggctgccacatcaggaggcttggattaagtgatttgtctccctccaacacagctgctctctggttcctgtctgacaaatgtggttcattagggctgacaaagatgaatgtccttgtttgtgggagtctgctaagtgctgttctcagggagccagtggacctggatctgaagaaaggtatacatcacattggcgacccagcagagcctctcagtcacaggctacagtggtgacatgaaggccaagtacgagctacctgccatgagtaggtcccacgagagcttcctggttggggtacagtgaaatttggcagctgaagacagcttctatcatcgccatctgagagtcaacctgtttttgaaagtagttgccctgtgatgtacttgcaacatactcaccagccaacagacacacatctgggccactaacatctactaagcaaattctataggctggatatgtagggggaggactgagaacctgggggtggttgttgtcaagggaggctgaagcctcagaaacacaaaatgtgggcatagccagagcacttcagcggcagctaccatttggaaccagaaacagtgcgagcagctgcttccttcctgtcctgatcatttacttcagtcaacaattccacgactctaggagccctgaaaaactaaagcaatcattctcagcctgggctgggcagcgagacgcctgcagctgtggcttccaaagatttggaccattatccacagtgagaaacattgtatatcacaacccagggcacacgtgtgtacacataggcactttcaacagttttaccaaatacagtgaaattcacactggtattctttattctattttcttctactcaatttcatcttttaaaaaatgctggttgtaaccaataaatgaaattccctgattgcttatggctcataacccttggttaaacaacaactctgactaaatggtgcttttaaaaaaatccacattaaccttgttaggacaagacctcctgagaaggggtcctataatctgagacatacaggatggacaatagttggccaagcaaagggatgtggaggagaaagcatttcaggtagaggaggcagcatatgcaaatgtgcgactgagagagccacatctgccatatggagaagtggaaagttcagctcagctggggcaaaagtgttgtgggagagggtgagggaggggttgagagtcagtggtccatcatagagggcttcacaagaccaggcgaagagtttggaattgatgctgagggcagtgaggggttcttaaaggattttaagcagacgagcgatatggtcagatgagtgctttctgaaagaccactctgctgcgtggaagatggatttggggtgtggaaaacgggatggggagagcagtgaaggcaaggctggatgcggggagatcaggtggctgagcccttgtgcacatgcgtgatgtgaattagaactaggtaccccctgtggggagaccgaggcatgaaaagagcctttctcgacagatgcagggcttgtccaggtcagacttgtgtggctggatttcagccccattcaccctcaggcctggtgtctccaacaagacatgacccaaatgactgtgggtggcagctctgctggtttggaggtaacagcaaaggctcaggaaagagacaatgatggtggggatgatggtaggaaagaacatgggacatgcaagaaataattatgatgggaaggcgagctgagtgcccttgagggtttcttctggccacaagactctgggatcctcatccacctctgcccaccatcctcagtgtcctggcctcttgcttcatccttgtttgagtagcagagatacctacagctgtggcttgtccagggctgaactaacgtgcagaggctgtgtagtgaagggtgcttagggaaagatgtctgcagcctgggccacagaggggaggcaatgtcttagaggcagaacctacctcttcttgctccaaagaagggagtgggaggagcaaaggagcaaaaggagccctcttcctacttcatggtgagaacttggaatcagatctgaattgtgtgttttaaacccggctgactttcagatgcagaaagtggccagcaagtcaggggctctgctgctcagcaaagaggaagagtcaaggcacacagctggacggtggctggagaatgatacctgtgtctcaggtttgtctcccaccgaggtggggctgtgcaataaacccaagtggtcccagctgtgggtttttgcgccctctggcttaacctgagccccactcaccctgcagtgggcttttatctcccatgggttgaggtcatcgggcagaaatctgtccccattttggtccctcccagccctaaacagggaggtctaatgttgcccagcaactctacctagaccagggtcaactaaattcaaggaaaaggagtagaaagtcctctttctgcctctggtcagagccatgttctccaatccaactttacaaggcagccctgaactttgggcagtagagcagaggctgtttgaatagtgcttatttcaatttctcaaattgtttagaagccacagggactatgggtgtgggtgtaggtaaagaactaggcttcctcagcttcaaacacatgccattaaacctctctaaactcccctatccccattttctagaataggattctaagactgccccgaggcttagctataatgcctatcatacatcgagtgcagtgcctggcttgtgtgaatggtattttgacgaatggacttcctttttcagattgctcaggctgacctgtaggtccatgccaatattgggcgcttaagcagctgaacagggaggtctgagatggggagagccaggggctacctctcggccagagtccatggggacaacaggggtggaaagccacagaaagtacacagcaagaccaacgacagggcagcaatagtagtaacagctggtatgctcctggaactcggctaagtactccatgtgtacctaatccttgcaatgaagaatattgccctcattaggaaactgacatccaaagagagaaacttacctacgtttaggcaaccagtaaaaagagcctgaaagcaaagccatggttgcctggctcctaagcccagtggaagcatggataagaaactactcagggccaagagaacaccaggctggggtggacaggtggagactgagcaggacaggggtcctggacactcctgcggacccctgaggggttcacactttacctttagcgctggggtgtgtacaaatcaagctggccccagctggggggagttacctgaggctccaccatgtttgagaaagtaactgatcattcaagggccctggtgtggtttctggaggaggctcagtgagtgctccccattcgtggcttcctgcacacacacctccctcccaccttatcctgcactaaagattttttcttctcgctccaatttgtttttttgcttctgtttaaaataaattccacaacactgaataaccttcccccacaaggttggagttaatcaggctgaatttattaagatctttacaattaaatgagctcataccaggaggaggaaagttaccttattatcccattttaagagctcaaataatttcagtctccaactttactgtcgacccccaactacttccatcgcggtcgccaatgacttcagagggcgctggaccacggtcttctccgtgcttcccatccctgatgtggggagaaacgtgctcagaccagtgagtcactgcagagggaaaccaagatgagaaagggcgggcagttcagcatggatggaacctgttctagttttacaggcaaaacttgggcgtgggagtctacatcatgaagagacgattcctcccaggggctcatcctctggggtcagtgttggccttgactgggtcccttcctgctccagtccttggcccccagctcttctctcctcatagcagggccctcttgcctgacacctgcaagattagacagacccagacaagtgggggtttcagtagcctggaggaagggactcagcccagaaggagccccgatgctggtcccatcctgacctagaccccctgccttgttcctgagtgcccgatcttgatttactgcatactctggcactctgaggtctaggattcctctgttttggtcttgccagctttgctcaacagaacccacaacccacagggttgtccttctcacccccaaagatatgttgaagccctcatactctttatgtgtgaatgtgaccttatttagaaataggatctttgcagatacaattaaattgatatagggtcgttagagagggccctaaaccaacaggactggtgcccttataagaagaggagaagagacacacccagagagttcaccatgtgatgatggagacaaagattagagagatgcatctacaggtcaaggtgcaccaagaattgcaggcaacatggccaacatggtgaaaccctgtcactactaaaaatacaaaaaattagctgggcgtggtggtgggcaccggtaatcccagctactcgggaggctgaggaaggaaaattgcttgaatccgggaggcaaaagttgcagtgagccgagatcgtgccattgcactccagcctgagcaacaagagggaaacttcatcttaaaaaaaaaaaaaaaaaaaaaaagaattgcaggcaacaccagaaactaggagacaggcatggaacggactcttcctcagagcctcccagcaggaacaaaccttgctgaaccttgcttctggacttctaacctccagacctgtcaatgaataaatttctgttgttttaagccacctaggaggctaatgcaggacccatatgcccaccactgctcctaataagcttctgagttctatcacccatgttcctgggtcaccatgttctgtcatgtttaaattccttcccattgcctcctcctggctctgcctcttccttaccaattccaatgaccagtccagcctcagggtttttttttttttcctgttctaggtgctgagcccccacagtgaactccagattatactgccctaacctatactgatatattcaggaggtccgccctcagaggcttgttctgtgtcaatgaggggccccgcattgcccctgtgcacagatatttgtctgctaatcagtgttcaaagcaactgtctaaaaccctcaagccctccctcaattgttggctcacagttctactctcatgaacccccttgggccttaggaagcactaagaacatgatggaggcagctggctcagttaaatgcttgaatcccttcgaggtttcatccaggcagcactgctcatgagtagaagggtacagcaatacagttgtgcgaccaggtggtgtccaacttacactgactttaacgaatgtcagggacagacaccatgggcatacccagaaaccctttgttaatgacttcggctcaattaacctttctgtggaactcacactcttttccttcataactgtgttatttatcttttctttatttctttattttttattgtttttttttttgagacagaatctcgctctgttgctcaggctggagtgcagtggtgcaatctcggctcgctgcaacctccgcctcctgggttcaagcaactctcctgcctcagcctccgagtagctggggctacaggcacgtgccatcatgcctggctattttttttttttttgtattttagtagagacggggtttcaccatgttggccaggctggtcttgaactcctgacctcaagtgatctacccacctcggcctcccaaagtgctgggatgacaggcgtgagccaccacgcctggactattatttatctatgcatagttccactctccattgcaattattccctgactttccccaagatggaatcaactagacaacatttattgttagcttcatatgtatgtgtgttttccttattacaatgttattttccctagagaggggttccactgacagggccattaggaagtggtagagaaataatggcaggctttgtgaaatctctgccaaaccctggactcttggctcagctcatgtttttggtccaaagaatatagatattctgcactttttacctcctggctctatgtttctccacaatgttttagagatctgcccatgttctctagagttcatgattgtgtagactgtctttccgctaactacgccttacaacttctcttctggtcggttccactcacttgatccccaccattttgccctgacccttggctctgtcttctggttgcagtctcactcccgtcccctttgaactttacttttccaaatctaagttttctgctttcaggttatgggccccagaaacacatacctaagtacctgtgcctctgcacaaaccctcatgaggactccatctgagccatttccatctgcttcctcctcactgtacacagcttcctgaacagctctttgctgtcaactccagccctggcccaggagggaggaagggtgtgaaacgtggatgataggtatggtgtagttcaaacaggatcagagagaagggtttgattttcattggaagagaagttcagatgggtatttcaggcagaaaataagccaagtttcagatttcaaacttcagaagagcaaatttcagtgtggtctggagttttggggagcctctgaaacatttcaggggatccataaggtcaaaatgattttcataatgataatgatatgttatttgccttttccaccgtgagatgtttgcacccacattgccaaaacagtggggggtaaaattgtttagcataaatcaaggcaatagcaacaaattgctagtagccactgtattcttcactgccagacacaggcagtaacaaagcatcaatgccacttaagaacgtttttcacagagcagtaaatgttattaattttattagctctcaagtcttgagtacacatctttttttatttttaaaacaataggccg[133 bp omitted]gaggcaggagaatggcgtgaacccgggaggcggagcttgcggtgagctgagatcacaccactgcactccagcctgggcgacagagtgcgattctgtctcaaaaaataaaataaaataaaataaaaataaaaaaagatgtgtactcaagacttgagagctaataaaattaataacatttactgctctgtgaaaaacattcttaagtggcattggtgctttgttactgcctgtgtctggcagtgaagaatacagtgactaatagtaatttgttgccattgccttgatttatgctaaacaattttacccaccaccgttttggcaatgtgggtgcaaacatctcacggtggaaaaggcaaataacatatcattattattatgaaaatcgttttgaccttatggatcccctgaaatgtctcagaggctccccaaaactccagaccacactgaaatttgctcttctgaagtttgaaatctgaaacttggcttattttctgcctgaaatacccatctgaacttctcttccaatgaaaatcaaacccttctctctgatcctgtttgaactacaccatacctatcatccacgtttcacacccttcctccctcctgggccagggctggagttgacagcaaagagctgttcaggaagctgtgtacagtgaggaggaagcaggtggaaatggctcagatggagtcctcatgagggtttgtgcagaggcacaggtacttaggtatgtgtttctggggcccataaactgaaagcagaaaacttagatttggaaaagtaaagttcaaaggggacgggagcgagattgcaaccagaagacagagccaagggtccggccgagtacacatctttttaatattcagtatgacgaataaagcactggtgctgcttagtacaatggttgtctcaaggtaaacttctcatgtgcttgtttcagttgtgagctcaattagcctctttctcatgaaatgaatgccgtttttacttgaaagaatgactgagagccaggctatggatattcaaacaggtatttttcagacacttcttgaaaataagtgaagcaaacctgttaattacaagggaagcaatgacaatatttgttgccaatgataaaaatcaagttttcaattaaaattagaattttgaagatcttgtaacagccacaattgagcctagcggttctccatatttgaagacttacatgatgaggcctgtggtgatattaaaaaatgtgaatttttggtactggataatgaaatgtgtcaacatttgaaatatctgtgtggctcagtggaccaatattttccaaatgaccaatgcatgatgttacaaagtaatgcatggtgtaagattcattcaaagttcaagatagatggatgattttaatacaatgaagtacaaaaatgtttgttgatataatttcaggttcctcatttaataaagatgattgtatcaaaggagaatacccataattatctttttaaaatattactaaaacattctcccttttctaacttcatatctgtgtgaggctcaattttcttcatgtttttaaccaaaatgacatattacaacagaacagaataaatgctgaagcagatagaaggatctagccatctcctattaagctagacgttaaagagatttgcaaaggtggatgacaatgtcactcttctaactagtttctttttagaatatagttatcttttatttaaaaacatgttagcatgagatgaccttattatgatttttaaatgaatgcttttatgatttctgctttaatttctaatatagtgaatattaataaatataacctatataatgaaaatatccttaaatgtgtaaagtcatcctgagaacaacaagtttgagaatcactagcctgggagatagcccaagtctctggaatataaggctaaagaaagttttagaggagatgaggttggaagggaaatttgttgttgtttctttggccttattttgtttctttactttctcttttttcttacatccctggatactgaaatgaaaagatataatgagacagtatccctatagcagtttgctggaagtcaacacccgagacagggattcagcgactgtcccctgatcccgttcaaccctctgatggggaacccgatggtcaggtcactgcaatggccttctgtttggcctgtggcttcaacccatagtaatatctcctccttgctttagtacaacccaaaagacatctactttcttttaactctgatatagactaaattgtattcccctaaaattcacatgttaaagtttaacctccacaggctgtatttggagacagaaactttgaagaggtgcttaagttaaaaagagaccattagggtaggtcccaatccaatctgactggtgtccttataagaagaggaaatttgggccgggcgtggtg[131 bp omitted]gtggcgggtgcctgtagtcccagctactcggtggggctgaggcaggagaatggcgtgaacccaggaggcagagcttgcagtgagccaagatcacgccactgcactccggcctgggtgaaagagggagactccgtctcaaaaaaaaaaaaaaaaaaaaaaaaagaggaaattcggacacaggaggcactaggaaataactcagagggatggttatatgaagaggccacaagctggtggccatctgcaagccaaggagagaggccttcagagaagccaaccctgccagcatcttgattttggacttccagcctccagaactgtgagaaaataaattcctgttatttaaaccaccccatctgtggcattttgttatggcagccctagcatacggatacactcacattctcgtgacagcaactttgtttagagcaggtacccccactactcagtatactcaaggatcaaagaaggtaagtgccaggcttgtgatttcacaactagtccatggaaaacccaggtctcaaacgtacagcctgtcactctgagtattttttttccccactggaccacatgtggtctttgactctgttctcagactgggcactcctgggttctcctcactgcagctgacgttcaggatgaaactgagtgttgagccccactcaagcttgtctcatgcagttcccagtcaaaatctgctagattccatgaattatcttttgatgcctatctgcattccttaatagggtagccagtagctacacgtggttactgagtacttgaaaatggctaattagaattcagatgtactgaaaatataacatagtcattatattttaaagatttagttagaaaatggaatgcaaaacatctcattgatatttatattgattccatgttgaaaagatgatattttgggtatattggggtaaataaactatattattaaaattaatttcatctgtttctttctgattttttagatgtagcaatgacaattgcaaaaaaaaaaaaacattgataagtgagacctaattaaaccaaagaacttctgcacagcaaaagaaactattaacagattaaacagacaacctacagagtgggagaaaatattcacaactatgtacctgagaaaggactaataccagaatctataaggaacttaaacaaatcaacaagaaaaaacaaataacctcattaaaaagtgggcacaggacaagaacagacacttctgaaagacaaacgagtgactaacaaatatatgaaacaatgcctaacatcactaatcattcgagaaatgcaaatcaaaaccacaatgagataccatcacaccaggcagaatggctgttataaaaagtcaaaaaataacagatgttggggaggttgcacagaaaagggaatacttatacactgttggtgggaatataaattagttcagccactgtggagagcagtttggaaatttctcaaagaatttttaaaaaagctaccattggacccagcattcccattactaggtacactcaaaggaaaataaattgttctactaaagggacacacgtactggcatgttcatcacagtgctattcacaatagcaaagacatggaatcaacttaagtctccatcaatggtgaattatacaccatggaatactatgcagccataaaaagaaatgagttcatgtcctttgcagggacatggatgaagctggaaaccatcatcttcagcaaactaacacaagaatagacgaccaaacaccacatgttctcactcataagtgggagttgaacaatgggaacacttggacacagggaggggaacatcacacactggggcctgttggggtttggcggggcaaggggagggaaagcattaggacaaatacctaatgcatgtggggcttaaaacctagatgatgcgttgataggtgcagcaaaccaccatagcacatgtatacctatgtagcaaacctgcacattctgcacatgtattccagaacttaaagtaaaataaaataaaataaaatgtgttacatatacaccatggaataatactacacatccataaaaaaagaacaaaatcatatcctttgcagcaacatggatgcagctggaggccattatcctaagtgaattaaagcagaaacagaaaatcaaataccgtgtgttctcacttatcagtgggagctaaacactgggtacacgtggccataaagatgggaacgatagacactgggggatccagaaggcaggagggagggatgaggggcaagtgttgtctatgtggtttggatgttttgttccctcaaaatctcatgttgaaatgtgacctccaatgttggaggtggggcccagtgggagatgtttgggtcatggggatggatccttcatgaatggcttggtgccatcctccaataatgggctcatgtgagatctggttgttttaaaagagtctgggaagtctctcctctctcttttactccctctcggccatgtagcatgccagctccccctttgccttctgtcacgattggaaatttctggaggcctcaaccagaagtagatgcttggactttactctttgtacagcctacagaactgtgcgctacataatctcttttctttataaactacgcaatctcaggtattcctttatatcaatgcaacacagactaacacaagttgaaaagctaccctttggatattatgttcactattttggtgttggaatcagtagaagcccagacctcagaatcatgtagtatatccatgaaactaacctgcacatgtacccccaaatctaaaaaaaagtgcttactgaaacataaacgtacgataaaataaacatggctatgagtaaatttacaattacatatgtcgtatgtaattttacatttacatatgttgtacgtaatggtaaatttactcatagctatgtttcttttattgtatatcggacaataaaatattcctatcgggcagcactgatgtacattttgcttctcttacaggtctgtaaggttaacagtggtagaaatcttgccttttctttatcttaaatccactaccacactggtacctagaacacagagcaggtttgcagaggttcctttttagttcacaactgtaaatgtgcttgaaatgataaaatattagtacaaacagcaagtcatcaagggcctgcttactcctaccatgacccaattttgctaaagggaactgtcagcaaggactaaagtgttcaaacatcctggtgaagctagagttaaatcttttttttttttttaagacagagtcttgctctgttgcccaggctggaatgcagtggcaggatctcggctcactgcaagctccatctcctgggttcaagccattctcctccctcagcctcccaagtagctgggactacaggcacctgccactacaaccggctaatttttt[170 bp omitted]tagagaattattgtccagtgggaattaaagattaaacaaaggcttggaggtaggaatggccagggaaggtctaagggactgagttttgtccaagacagtggtcctcaaaatatgatttctgcactaacagccaatattttgtgggaatttgtttgaaatgcacattcttggatcctaccacagacctactgaatcagaaactctggaggtacagcccagcgactcacatattaacaaggtctccaggagattctaaagcacactgatgtttgagacctactagggtacagagtttggatcatccataaggcagtgaggagctaatgatgggcttttaataaaactgtgatataatgagatcataggtggggaagatgactcctgagaaccagatgggagcctggcctccacatctggtctgatgtctccacccatctgagtcccaaagacatcagtcaaagattggtcgagtacctggagacatatagcaccttttctaataaatcccaactgtggaagaagtatggctttcctaaagtatctaaaaggccttctttaaaacccagcacaggtgtgtgatgttcccctgtgctggtaaatgacgaattaatgggtgcagcacaccaacgtggcacatgtatacatatttaacaaacctgcactttgtgcacatgtaccctagaacttaaagtattaaaaaaaaaaatcccagcacagatcctctgcttggttctgcaccagaaataggaatcaggctgtgtttctttgcagtgagacagcacagaaaagcctccccgggatgtctggcagctcctacttggttccactggaaagaaaataagaggtcattattcacaaacaaggtaggtgaacgtgtgtctttgaaagatgtggggcattctggagactggccttgcctacaaatgacgttctggtggaaaggctgattttcgtgtcattaattcaagggaaaatcttcccaaattggtaggtggtttgtaaagacattaccctgccttccttatgttttccttcttcttcatttcttcctccctctttccatctctacttccttcctccttttttcctccctcctcccttcctcccctctttctctcctttcttctttctctctatcctcaatcccttcaattgctggattaactttttctgaaacacatagcacttaacatatgccaggcatttttttcaaggactctgtacgtattacctcacttaatctccctaacaactctatagataggaagatcacatatttatcatccaaaccaagacagctttgtgagtataaagggaagagaggacattagggccagccaggatgtatcgtcactataattatagagacagtttgacatccctattttagagataaggaaacaggcacagaaaagtcaagtaacataaagttaaatagtgcataggtgctagagcctggattcaaacccaggcaatctggctccagactgtgatctctttacagtaggttgtccttcccctccatcaaccacagtctatataaacaagtagtagggcattctgggaaaagggaacagcattaaccaaggtatggagagtcatggaatgaggccaatcaccacgcctggaacatggagcatgtaggcagaatggcatgagaaggggcttttcttttatcttcttttttttttaaaaaaaaaacagaaacaacacttattgtttcaattaataaatggccatgttttgtagtcattaatcttttttaaaaaatcttttccttttgaagatagtaacatgacatactagagaaatactatcttgctctttttgggatatcaatgggcactctattaataaattttcattgaaaacagtagtcaagcacaagagattctaatgtccattaatactgaaataggattaaacacttaaatgtaaagcctaaaacaacaaaaaccctagaagaaaatctgggaaatgccattctgaacataggccctgggaaagaagtcatgacaaagactccgaaagcaactgcagcaaaaccaaaaattgacaaatgagatgaaattaaatgaaggagcttctttctgcatagcataagaagctattaataaacagacaacctagagaatgggagaaaatatttgcaaactatgcatctgacaaaggcctaatacccagaatctgtaaggaccttaaacaagttaataagcaaaaaccaaacaacaccattaaaaaataggcaaaggacatgaacagaaaaggcttttctggtcatcagataccagattacaaagggtttccctctttgctaagatgtttggaatggtacctggcggtgggcgggtaatgaggagccagggaagggtatgaagtggggcagtgatatgatcagggagaagtccacttgggcaccaggtgtgggtgaaccggcggcagacagaccaatgggacaggatgagagggtagaaatgggggaagagagcgagaaaagagaaagagaaatatgttggtggtagaatttggtgggttttaacgtctggaaatgggaagtaagtaaagggaacttgtggctaattctcaggcttgggggactgggtaccatcatgaagagggggcttgtggagggggaacatgatgaatttggcctgcacattaacagtttgttttaaatccaggcttattgaaagcaaaaatatatacaatagtatttatatttttagggtgatctttggcaaaaatatatacaaaagtatttatatttttggggtgatctttggcaatggataaagttgtataaccactactgtaatcaagatacagaacactttcattactccaaaacattctattctgcccctttgtcatcagtattccatacctcccacagccctggcaaacactgacctgatttctgtctctatagctttgactttcacagaatgtaacatgaaataaataatacagtagtcattgtcacatgtttattctttcacttagaatacagtttgtgatgtattcatatcgtttgtgtgttggtatttcatttatttgctggatagtatttcattacatgaatgcactaccgtttgcttattgattcatctgttgaaggacaccttggttgattctagtttgaggccattatgaacaaaactgctctaaacactgatatgtacatctttgggtagatgtagttttcatttctctttggtaaataccgaggagtagccttgccaggtcatatgatacatgtatatttcgcatcataaggaaccaccaaactgtatccaaaagtgattgcatcgctttgcattgcaccttgcaatatacaagagttctagttgctctgcatcctctctagcacttgctgttgtcagttgttttttttttaattttggcaattttagtggatacagagtgatattttattttggttttaacttgcatttccttatggtaataactaatgatgttgaacatcttttcatgtgctcatttgccatctgtgtatcttatttggtgaaatgtgtgtttgaaacttttgcccacatttgttttattttcttcttactgagttgttagaattatttacacattctgaacacaagtcctttattacatagctgttctgcaaatatctgctagcactctgtggcttgtctttaaattttgggggaagagtgggaggggcaagggataaaagacaataaataggtgcagtgtatactgctcgggtgatgggtgcaccaggttctcacaaatctccactaaagaacttactcatgtaaccaaataccacctgttccccaatgcttaagaaaaataaaataaataaatttaaaaaattctaaacaatgtccttcaaaggaaggacagtttttaagttttataaatcatatttatcaggttttttcacttttggtttgcactttttgtgtcctaagaaatccttgactaactcaaagtcattaaaatttttttctatattttcttctagaagtttttaaaagttaggttttaactttaggtctacaacccatttgaaattaatttcatatatggtataagtggagggttgaggttaataattttccataaagatatccaatacttccagaattatttgttggaaaaggcattctttcccctttgaatttccttggcacctttgttagaaatcaatggactgcacatgtgtatatctctgattttctaatctctgttacattggtatatacgcccctccttgtgccaatgtgcactgtcttaattactacaattgcatagtaagccttgaagtcagctagtgtgcatcctccaatgttgctctttttaaaaattgctttggttcttctaggtccttttccacataaatttttttcacatacctcttgtagtcaacttgttaatttttacagaagaagcctcctgaaattttgactgtaattgtgatcagtctggggaaaataaatttcttaaaaatatgctgtcttttgatccatgaacttggtatatttctccacttatttaggtactctttattttctctcagaaaggttttgaaggcttcagattattctgcaaccaaacttgatgaattcacttattaattcagttaacctttttggtacatttttgagattttctatatagtcaatcatgccatctgctaatatagagttatagttcttcctttccaaaggatatgccatttatttccttttcttgcctttcataatgatagaacttccagtattatattgaatgggagtggtgaaaaaagacatccttgtcttattctctgtctttgaggaaaagcatttaatctgtcagcattggctatgaaagttcagttgtcagtttcttcatagatgtctttttttatactgtgaaaatttcttctattcctagattgtggatggtttaaaaatatcatatatgaatactgaatagtaccatcttctttttcagcatttattaagataatcatatgcttttcgtttttcagtctgttgttatcatgtattgcattggttgagtcttgaatcaatcttgaattcctggaaaaattttcactagattgtatcatattattattttcatatatttttgattcaatttgctaatatttagctaaagatttttcaacgacatgcatgaaaaacattgccctgtagttttcttttcttgtgatttctttgactgacataattgttagggtaatgctggcctcataaaacagattggaaactcttccctccctttctattttctggaagagacttaaggttcatcttctctgattttgttgttcaggtcacttatatcctttgtggttttcagtccacatggtctttgattaccgagagagtggggaatctccaagtgtaattgtgagtttgcctatttctccttacagttttatcaatttttgctttatttgttctgaagctctgttgttaagtgcatacacattaagatttttgttttttgattatgtaatgtctctatctctgatgatattctttgctctggagtctacttggtttgatattgacatagccactccagctttcttttaatgagtttttatattttttcattcttttgtgtttaacctatctatgattttacattggaagtgtgttttttatatagatagcatactgctgggtcttgatttttgttaatcaaatctgatatttctgtttttaaattgggctgcttaggccatttatatttagttcagttattaagcttgctggatttaatatacacatttaaatatgtgattttgctcgattttttcttttctcttctttcacttttaaaaaacatctgattttattctgaaaccatcttatatttaaaattccatttcagcctgaaaacaaatatgtggttcctctttgatgaggagccggagcccagcgtgggggaggagtgaggacgcggaggttttgtttctcaggtgatgtttcactgacgagggagcgctgcacacgcttatcttcagataacaggcttcactctgatccgcctttgatacaatcaataaccttttgtaaagattctttagggcttgaaatgttctgtggctgtgaattaatggatcaaggcagaaggtgctttggcactttcagaaatagtacacagaatggctggatgctgatgaaggaggcagaggctcactaagaatgatgcgttctaagttaaatattatagcaggctcaggaggaaagaaggctgaagggtaaaccagggctcttcatattaatcttgctggttgtttgctatttgttacatctgcttttttttttttttaaaccttgttctagttttctgctttcatttgaatcagtgggacatttttcataactcatttttatctccactgttggtttgcttgttgtacctctttttcaactttttagtgattgctgtagggtttaaaatatatacctttaacttatcacagtctttcttcatataatattacactacttcaggtatagtgtacagccttatagaagccatatatttccatttccttactctcgtttttggtgccatagctgactttacttctacttagactataaacttcagatacattgttactatttttacttcagggagacatgtatatacatatatatgttttttttttttttttggagacagagtctcgctctctcgccaggctggagtgcagtggcatgatctcggctgactgcaatctccacctcccaggttcaggagattcccctgcctcagcctcccgagtagctgggaccacaggcacatgccaccacacttggctacttttttgtattttagtagagatggagtttcaccatgttggccaggatggtctcgatctcctgacctggtgatccacctgcctcggcctcccaaagtgctggacaattattttttaaaacaatttaaaaattagtcttaaagtgtcttttatatttaccaacatttttacactttttgtatttcatttctttgtatagatccaaatttccttctggtattacattcccaaagaatttcccttaacagttcttggagtgcaggtctgctagcagtacttccttttggcttttgtttgaagaatctctatcttaccttcatttctaaaagatatttttgctttatataaaattctagactgacagctttttattttagtactttgaaagtgtcagtccattttcttctagcttgcaacatttctttccgtaagtctgctcagtttttatatttgctttttgtatgtaatgtttatttcctctgactacattcaagactgtcttcttctttttaatttaagtttttagcagtttaactatgatgcgtctaggtgtgtctgtgagagagagagagagtgtgtgtgtgtgctgtaacttattctgcttgaggttctctgaagttggatctatggtttgctgtatttcattaattttagaaaattcttagacactatttcttcaaatatttgctcccattttctctttctcttttccttcttggttccaattacatatatgctagactgttttatattgtctcacagctcttgaacgttctctttgtttttcactttgagttttaatttggataattttcaccgacatattcgggttcaacaattctccttcagttgagtctactctactaataagcatgtcagagaaattctttatccctgacgtcgtatttgtacatttatagcaattgacttttcccatttataaaatagttttcatttctttgccaaaattctccatcagttcctgtatcttttccacctatcccccactagatactttatcatatgaatcacagtcatttgaaagtcttagtctgatgtttctgacatcagtatcatctctgagtctggttctgttaattgctttatctactgatagtgcgttgtgcgttccttcttttgttgcatgtctcacagcttgatactgaatgtctgaccttgtgtgtagaggaacagtaggggctgaggtcagtgatttttatcccaggagtgggcatacttcttctttggtcagattcttagggtagaggctgtgttaatctgatgaagggttgagctgggctaaggttttctgttgctatcccttctttccgtgtaccacatgctttacattcctccagaggagatctgctgttattttgtgcttagtattgggcctgccataccagggagtttttcttggttgtcctgcttcaccctcagattttagcagcctctgcacacctgcaacactgagggagtctttctccatcctccatcagaagatcgccgttgctgtgcccagggtgaggctcgtgatggcatgagggctcttctcactttttgttgatcttcagtcttgggaagaccttgtgcctctgggcctcagggatgggactttattgacagtcttggttctctctccatggcagtctgacactccttgtgtctatggttggcacaggaccctttcttctcccagaatgagtaaacctatgctttgtgtaagtgcaagattatggacctgatactgtttcctccccttccccaagggcagcaggcttttgtttctgctcctcccccagaatcagatggtttggctcttacctcttcccaaaaaagtagagtgtctttgcttaggccctgggaggaagggggttttctctctgtcatcccagtagctcaaggcttttgctttgggaaagaaagttctgagaaaatgagaaaggcttcgttcctgtgacccagctgcagctgaccagcacctgcatgctggtgcccccgacttgagccttcttcaatctcctgccctgtgtctagtctttcccatgatcacacagctgagacttctggaaaagagcttgcaagtgagtgcaaacttcccttgcttctggggctctcaattttctgtacgttcatgctagcctacactcattcttcaaggattcattcgcgttttagctgatttcttcttacctacttttatggtggccacattttcttccaatgttttgccaaaggtgaaacatttcatatgacccattgctccttaaaaggatttgccactcttcagaattcagttcacttggctgccttctgagctcagctctctaatgggctcaaaaaacgtataattttgtagattacctggatttctttctcatagtgaggatgggaatgacatttctcgggggatttccgtgtccaaagtggaagtggaagtggaagtggaagtccctaaacacgtgaagtctgaagtgatttgaggacattcaagcgaacacatgcagggacagttcaatgtatctgtcaggaaagcaaaacagtggttgaaacttgttccagtttatctatcactacataacaaactaccccaaaacatagtagcccacaacaatgtttatttcactcataaatctgcagtttagacacagtttggtgagaaagcctggtctgtgctctatgtagcatcagctgattaggctcaactgagggctacaagatccacttccaatacggtggactcactcacagaggcagctgggattgacacgttggccttggcaattggctgggatctcagctaggtctgagtgctggtgggaggggcctcagttcctttccatgtgagccttttctcacgggtctcatcacagaatatctgtgcctgctcacaacatggtgatgagctctgagattgagcatcccaggagactcacatggatgctgaagtgtctcctatgacctacccttggaagccacatagcaacaaaccctcccagatttaagggaagggaacatggacccccatctctgagtggaaagactgtcaaaatcagattataagaagagcatcctttgagaggccaatgtgggcagattgcttgagctcaggagttcaagaacagcctgggcaacatgaagaaacc[132 bp omitted]tgaaaacccttctctactaaaaatacaaaaattagctgggcatgatggtggtcacctgtaatcccagctactcgagaggctgagggggaagaacctgggaggtggagggtgcggtgagctgagatcgcaccattgcactttagtctgggcaacaagagcaaaactccgtctcaaaaaaaaaaacaaaactatctttctatctgtctatctatctatctatctatctatctatctatctatctatcatctatctacctatctatctataaattagctgagtgtggtggtaggcatgcctgtggtcccagctgcttgggagactaagatgggaggatcatctgagcccagggaggtcaaggctgcagtgagctgtgtttgtgccactgcactccagcctggatgatgaagtgggacccagtctcaaaaaagaaaaaaaaaagaagaaagaaaaaagaagaggagaagagcatgtgggattggagatattgatagactatttttggaaaatgtaatctgcttcacaactcagatttagaagtaggctagtgaggacattggctggatattaggaaattgactgggaaatcttagaatcttctttggttcacatgggaggaggctggagataaaatgaagcagattccaagccatcagtcctctgctttcataaaggtgagtttgaaccccaaaatgttgaaagaaatgtgagaaggtgatagaggacgctggtgccagaggttgagtgcatgagttggaattccaacctcactgcttcttgcctgagtgactttggacaattaaataacctctttggcctcattttttccatcagtaaaacgtggacagtagttccctcttcttaaaagtgtcgtaaacaccaaatgagatgattcatatgaaaggtcatagcatcgtgcctggcatctagtaaaagcataatatatattaatcttttttttttttttttttgagacagtgtctcactctgttgtctaggctggagtgcagtggcacgactttggctcaccgcaacctccgcctcctgggttcaagtgattctcctgcctcagcctcccgagtagctgggattacaggcatgcaccactaccatctggctagtttttgtatttttagtagagacggggtttatccatgt[133 bp omitted]taatcctggcgactttaggaacttccaactaaaatttcacaattttgagctttagataaaaatatatgagaacatgtttcttggctaatgataatagaacttggcattttctgagcatcttctatgttgcagctttgaagtttatcctctcactgatagttacaacaactcagatggaaaaaacttaaagtataataaaaaaaaaaaaaagaaaaaaatggatgctcagggaacttaagaaatgtgtccacagacccacagccaggaaacagtggagcaggaactcaagatgatctgactttgtttggcaaactttttccttgacctagagagggactgctgggaagaacaaaggcgagacaaccctggtgctttcccctagagatttcccccgtcattaattatctattaaaatgcttcaggtttgcagcttccactaagaaatgcaagagtattccaagttatcacgtttattaaaaatgatcaaaagtatccagcaatgtttaatgagattctttggagacaattaccaaggcactgaaagctgggaataatttattacatgctaatgataaaagttgaaactgccttaataaaaagtttatcacttccagacttaaaatgttggactctgacccttttcttttcttgctatgagcttcttcttttttttttttttttttttttttagacggagtctcgctctgtcacccagcaggctggagtgcaatggtgcaatcttggctcactgcaacctcttcctcccaggttcaagtgattctcctgcctcagcctcccaaagtgttgggattacaggcatgagccaccacacccgaccgctgtgagcttcttttaaaagcagaaaagattgtggcctcacattttaggatggagtacagtggagaaaatagtaactgaggggtatttatgatttcctgaaaggtctcagttttttctacagagcatgaagatggcctggtaattctctcatggctcttgggatctcagtcactcacttgtcatgtagttttgtcctgtcctctctgattgtcccatgggtgcagggagcagcagagggctgtgggtggagcatggggctcgagatcaggagactcgggttagaatcccagctgggccagaaaacccttaggagccacgggttcctgttcccatccatcttctcccatagtggccatgaggaccaatcctgtgaacaaatgggcaccagcgt[137 bp omitted]catagagaaaccctgtctctactaaaaatacacaaaattagctgggcgtggtggtgcatgcctgtaatcccagctactcgggaggctgaggcaggagaatcgcttgaacctgggaggcggaggttgcagtgagccgagattgcgccattgcactccagcctgggcaacaagagtgaaactccgtctcaaacaaaacaaaacaaaacaaaacaaagaaagagaagcatcccagagtgccgggcgtctttttagggtggggaggggcagacagtcaggaagaggctggtgctcatagaccgtgaccctgggcctgcttgctctttgccattccacatacacttgggtttttcattttcatgggactgggcattcaggccccgtgtctagccaaaggcctgaagggtggttgtccttgaagtggtaattgctttaatggcaaaggggtttgcagtgtactttgtaaaagcctcggccacaggagcgtggaggctgcatgtgacacacaccattcaggcctctggctctgccataaaccactccagctccaggagtgtagtagcggggagcaggcaggggtgcccagtcccaaatgccatatcaagatgcacacctggagctgagccccggctgggctgcactcactgcgtgatcctgagtaggtcacttgtcttccaggaacccatcttctcatctgtaagttagccctcacatcaaaatcccaagaagatacaaaggcggaaaagtaatcatgagtgtgaaagtgtctcgtaaggtagaaaacactgtccagacttaaggagtggctgtcaagtcattgcctgacccacgtaggccattgccaggtcgtagagagcacctgttggatcgtcttggccacagtggatgagcccctgattcaacctgtaccggtcatggggcttcccatggtgtccactgccctggtcagtgtgcttagctcaaggttgggcactaaaggtaggctgttttcctgggaatttggaagacatcctatccttgctctggccatctctttaaaaaagcagaattcaacccagcagtgagagagacctgtgttctgtcttggggtctggggagcagagaaaccaggcatctgtgagagagaaaaattaggacggacagagaggagcacagaggaggggtgcagggagagtccagggggcttcattcctcctccagctatttatgtcttcaggcccaggtgcttcctacctatgggttctccaggttatccttgtgtcctctccttgtataaactccctctttactcaggctgcagagggtcttcgtttatttcaaggaaaagtccttctaacttctacagggccaaagcatgcatgtatcatattaatgtcaatcctgtgccagaccctttgtaaaattaagtacttcaaacttaaaataattcaaacttaaggctgttggaacattccgttattctgagccttgagaggaatgtggctatgcagtctgagtcatgcagcaggcagctgcaacttctgcctttttgtttgtttgtttttgagatggagtttcactcttgttgcccaggctggagtgcaatggcacaatctcggctcaccgcaacctccgcctcctgggttcaagtgattctcttgcctcccaagtagctgggattgcaggcatatgccaccacgcccagctaattttgtatttttagtagagatggggtttctccatgttggtcaggctggtctcgaattcccaacctcaggtgatccacccgccttggcctcccgaagtgctgggattacaggtgtgagccaccatgtccgactttttctttttcctgtaaataattaagaccaaatggtgccagagatgaaaccatctcagataactgcccttcctcacggagtaatagtcttccttggaacgtattaatagcaatctgtagcgaatcaaattgctgtaatgtgtgtactgctcttgtatggaaattgcagtaattctgctaacatctctctgactctgcctatatcagtaaaaccttaacttttccactttggaactctgacttcattcgtttgaagtcagtgtcttctgggcagccatcttccagctttgtgctgaaataaactccatacttaatcatattttctgaatctcattatttaatgttgacagctcttaagcgtctttaaacttttccatggatgttaaatatacgtgcattaaagtatgtaaagtgtatctcaggtacacagctggttagattttgtgtacgcccatgaaaccactggtcagatcaagacacaaacatttttagcctccagaaggtacttttctaccactttctgatcagttacaaaatctcttccttgttcaattcccacctatgagtgagaacatgcagaacacagggacacaggaaggggagcatcacacaccagggcctgttgtgggatggggggaggggggagggatagcattaggagattcacctaatgttaaatgacgagttactgggtgcagcacaccaacatggcacatgtatacatatgtaactaacctgcactttgtgcacatgtaccctaaaacttaaagtataataaaaaaaaagaaaatgaaatgaattaagttttaaaaacacagtaggctttcaataaatggtagctgtatttctttggtaggaaaaaaaaaatctctttcttgaggtaaccactattctgacttatctaaacagacattttgggtatggttatacattatctcactggttcttttatattaaaaaagctaattataaaatgtttcaaacattcagaaaagcacagaagataatatgatacctatgaatcgaatttccagatttaatagaattaaatattgttcatatttgcttttctttcttgtcttgcatatcatatgtctaggtgtggatttactttttttaaaaagaagttttgttagtttcagattgaagaagtctgaggattcatgtctttcatccgttatggaacattccaacacattctctcttctgtgtttgtttattttccctaacgtttgttgagaactatagcacacatatagaaaggtccacaaaagaaagaagtatagctccatattttattgataatgtatcacaaatttatcacccatgaaactgcttccaggtcgagaaatagagcattgccagcattcccagaaactgccccaagctcctatcccatcaaaattaatcatcattttttaatggcagttattccctggattttctttataattttaccactgaaggatgcattgctaatgccaaggtttatttttttctgcttgcacatgtctttgtttttggtttcctgagcaactttttatccaacgatctgtcattctttaagatcaattaacccaggatcattaatatcttttttttttagtaaaactttctttctgcactgttaatattgtagttaatttatttagggatatgcagtttttaaaagtaagatttttaacactgccaccgacagtgtaaaagcattcttatttctccacagcctcaccagcatctgttgtttcctgacttttcaataattgccattctaagtggcttgagatggtatctcgttgtggttttgatttgcatttctctaatgaccagtgatgatgagctttttttcatatgttttttggctgcataaatgtcttcttttgagaagtgtctgttcatatcctccgcccactttttgttgggtttttttttttcttgtgaatttgtttaagttccttatagattctggatattagaccttcgtcagataggtagattgcaaaaattttctcccattctgtaggttgccacataccagggcctgtcagggagtagggggccaagaggagggagagagcattaggacaaatacctaatgcatgtggggcttaaaacccagatgacagattgataggtgcagcaaaccaccacggcacgtgtatacctatgtaacaaacctgcacattctgcacatgtatcccagaacttaaagtaaaataagaaaatataaagtaagctttttattctagaatagttttgttatttacagagcaagtgcaaagatagtacggagagttcctgtagatccccacactccatttctgttactgttaacaccttacctgatggtacatttgtcacaatgcgtaaatcaatattgattgacacatgattattcactacatttcaagtatcattctcattgaatcacgtcaaggatgcagactctcaacacaacatatcgctgttgatgtcaaccttgatcactggcttcaggcagtgtttgtcaggtttttctgccgtaaagttaccctttttcccccgtctcttccagtattgtactctttggaatgcagtcaccatatgatggagtggggagttgtgttccacttccttgagggtggagtacctacgtaaattatttaaaatttttctccacaagacatttatctcttctctaccatttatttacttatttaatactttctttatatcaggatgaactcgtgaatatttattgtatgctttgggttttaatccaatgctactttctttattttgtggctcaaattgttctagccatggccattgggggttcttgcaggtgactcctctgtcctttcaacaccgtcccgtgtgtgtgtgtgtgtgtgtgtgtgtgttttgaacacccctttactttctggcactataacatgctccaggctcattttgtatatttcctgccctagtcctagagtcagccatttctccaaggggtcctgtttctattatctgagaatagtcatagaatccaaggtctgggtactaggtgtgtttgttgctattgggatacagttgctattgggacctctcaaaccaacagagcaatgcaatatatttatatatattaacccatgtccatacacatgcctataactatttctatttgtaaacttctgtgtctatttcagctaaacatgcattcatactgatgtgtgcaatgccaattcttacagacttcgctcaagcaatcctccaccccaggagttcgaggctgcagtgagctacgataacacctttgcactccagcctgggtgacagagcactgtctctataaaaacaaaacaaaacaaaaacaaaaacaaaaaactttgtatacctgaagattcactctttgtgctgtaatattctatggggtttttttcatgcacctttctggctcctccctttgcttgtctgtgagctcgcactcacggtgagaaacctgccctcgccgtccatttacttaattgtttaagttccatatacgtgtgtcgtggttcagaactgataacccacacctctatgggaaacaactttatcaaatagagcgctcatgcagagtgctttcttttgcctttggtcttacagatgccattcatttccgaggttacttccgtcagcaccatttccttccatctccttcaattaggtcccttcatatattcttaatataattagtttttttggtcaccttctatgttccttcctgagatctcctagtgtatttgtaattaattaatttattttttcagatggagtctcaatctgttgcccaggctggagtgcagtgatgcgatctcagctcactgcaactctgcctcctgggttcaagcaattctcctgcctcggcctcccaagtagctgggactacaggtgcacaccaccacgcccagctaatttttcatatttttagtaaagacagggtttcaccatgttggccaggttggtctcgaactcctgacctcaggtgatccaccatcctcagcctcccagagtgctgggattgcaggcgtgagccaccgtgcctggcctcctagtgtgttttttaaaactttgtatatggactgggcgaaatggtttacgtctacaatcccaacactttagaaggctgaggcaggaggactgcttgaggccaggagttcaagaccaacttgggcaacgtaatgaaaccccatctctaaaaacaattaggcggccatggtggctcatgcgtgtggttctagctactcaggaggctgaggcagaaggatccattgaactcatgagtttaaggctgcagtgagctgtgatcattgtaccactgcactccagtctgggcgacagagcaagaccctgtggactaaagtgtcatatggaataatgatgccgcctttaaaaaaatcccttgtatttcaaccattcaactctcccttgactcatccatccactggcaaccactgatcttggtttactgtctctagctttgcctttcccagaatgtcatatatttggaatcataaatcatacagccttttcagactggcttcttcagcttagcaatatgcatttaagattcatccatatcttttcatggcttagtaactgattccttttttcaatgaaaaagaattccattgtatgtgtatatagtaagccctcttatctttgagagatatgttccaagacttccagtgggtgccggaaatagcagatagtactgaaccctacatatactatgtattttcctatacatacatatatacataaatgacacatttatacataaataacatttatcttataaattagccacagattagcaatgatatctaataagaaaaatataaaaatttttataatatgccagcatcattacttttttttttttttttttagatggagtctcactctgtcacccaggctggagtgcagtggcacgatcggggctcactgcaagctctgtcttttggttcaagcgattcttctgcttcagcctcccaagtagctgggactacaggcgcccactaccatgccgggctaattttttgtatttttttttttttttttttagtagagacagcgtttcaccgtgttagccaggctggtcttgatctcctgacctcgtgatccacccgcctcagcctcccaaagtgctgggattacaggtgtgagccaccgcgcctggccaccagcatcgttactcttgcactttggggtcatgatgaaataaagtcaggggtacttgaacacaaggctgcaatactgcaacagtcaatgatgaggctggctactgaatgactcacaggcagggagagtctatggtgtggattctctggacaaagggatgcttcacgtaatttctccatcccaggtgggatgaagcagaacaacttgtgatttcatcacactatttaggacagcatgcaatttaaaacttatgaaatgtttatttctgggatttttcatttaatatttgtggaccatggtcgacttcatgtaactgaaacaacagaaagcaaaatctcaggtaagtggggaatacagtaccacagtttgtttatctagtcacccacctgttaaaggatatcttggtcgcttccagtttttcacaattatgcataaagctgctattcacatttctgtgcaggtttttatgtttacataagtgtttagaatcagtgggggaaaatacctaggcaggaatttgctacatgtattaataataaacttcaagggtgtggtaactcatgcctgtagtcccagcactttgggaggctgaggcgggtggatcacctgaggtcaggagttcgagactagcctggccaacatggtgaaaccccatctgtactaaaactacaaaaaaattagcagggtgtgatggcgggcacctgtaatcccagctactcgggaggctgaggaaggagaattgctcgaacccgggaggcggaggttgcagtgagccgaggtggtgccactgcactccagtctgggcaacgagagtgacactccgtctcaaaaaaataaataaaataaataaaaataaaataataataataaacttcatttaggaataattttcgatttacaaaaaagttccaaaagacagcacggagagttctgaagacacccctttcccagtttctcctaattgttacatctttcataacctcggtgtatttgtcaaaactgagaaattaacactggcccattattcctaaataaactctcgactgcatttggatttgaccagttttcccctgctgtccctcttctgctccagggtcccatccaggacagcacattgcatccagccattgtgtctcctcactcatctcttgtcttggacggttccttagactttccttgctttcagtaaccttgagagttttgaacagtgctggtcatgtattttgcagaatgtccgtcagtttggatttgtctgacatgtttgtcatgattaagactggggtgaggggtttgcagaagaacatcatagagctaaactgccctttgcctcacatcagggatggatgatgtccacatgacttactcctggcagtgtgaattttgatcacttggctaaggtactgtttgccacatttcgcccctgttaagttgctatttttgccttttctttctttttttctttttttggagacggagtctcactctgtcacccacgctggagtacgttggcgcaatcttggctcactgcaacctccacttcccgggttcaagcgattctcctgtctcagcctcccaagtagctgggattacagtcacccaccaccatggctggctaatttttggatttttagtagagacgaggtttcgccatgttggccagcctggtcttgaactcctgacctcaggtgattcgctggccttggcttcccaaagtgttgggattacaggcgtgagccattgtgcccgtcccccttttcatactctgtgttttggaagcaagtcatcaaatccagccttcattcggtagggagtgtgttgggggatcctggaggaggagaatctatttatattatttgtaattctcctgtaaacaaaaatttatcttttctacctctttgtttatttgttaactcatttgtttatatcaatatggacttgtgtgtatttattttatactgagggttttaaacaaatactaggcaattttgtttgttgctgaaattgttccagctttggccgttggaagtgctttcaggtttttagattggcttctgtgtcctttggcatcccctatccatttatttattatttatttatccttttatttattttagcattcttactttctagcactataaggtactctagtttcatcttgtgtatttcctgcccaaggtcagccatttctccaagaagccctggtttcttttattggagaatgattatttgccactgagatctggattctctgtgtgtgtattgctaatcgggggtcactgcttctaggcctctcagtgcacagagctgggaaatgtgtgagcactcattcatccatgcatacatacatatttgtaattatttctgtatccatccatctgtgtgtgtatgtgtgtgtgtatagtttaatataaactaaacatgagttcctactgtctgactctaacccaatatcctatcccttttagcctcagtgccttacttattagtaacattgttactttctctggcaaggagaaacctagcttccatgatctgtcatttattaacttatttgatagaccctgggatacatgcaatgtaatttcagaattgttagcttgtgctcttgtgagaaacaaacttaccaactagagtacaatcctcagagtcagttcgtttttttctttagctttacagttttccatcaaagcatagttttccaaaatttttaagttccccgcccctaccccttcagtctgtttatgctgtacatttataatgctgttagatttgtgtatcggacttcattcaattctgggatcccctggtatcctggttgggtttcaaaacatttgtatacattaaagatcaacctgtgtgatgtaaagttctagggttttgataaatgcatagaattatgtaaacaccactccattttcagacatatttttgaaaaaaaatctgtacttgagttttgcataaagagatgcagattgtgtgtgttcctttgtgcctcgtatttctttcatttaccattgattgtaaacatcaggccggtgtgtgtaactagagtttctttcttgtaatcatttgcatggtccattatttaaacgtatcactatttatccattctacttatattgaacatttgggctgtttccaatttggggctattaaaaaccacgctggtatgaacattcttcatgtttctggtgagcatatgcaaccgggactgttgtgttgttgatttcacacatttactgcttttgtttctggggattttccttttttgtgagttttttatttaaaaaatattttgtatttatctaactttctaagtatttgtagatggagggattctgtataaatttagttcatcatctttcagagcataacaatctcattaatctttacaatcattttctaatatggatgtcctattgtttccgttcaatcaattaagaaattgcgagtcagcaagatgaatcactttgcctgactatgtccttcctagtcaatggtgcagctgagagttgagttcagtcagctctgtctcccaaactcaggttttctcctctctttcccagctgtaaaaccctcctgacctctgacccaaagctgtgacctagatttttaaaatgtcttcttcctccctctcctgctgatcaccttttaacagtgtatccatggcctggacttacaagccatgccaattccctctgccataagctcagcactcaaagacttctacctgattccatgtgattttcatgcctttgacatttcacacagggggtgggggctggaaaggaggacaaaggagaggaagaaagaggagagaaagcaggggaaataggaagaaagagaagacactggatgtgtataccttcctttctccagtccaggggataaggtcaaaccaagaccctaaccgagctgctatttcacaaaagggttgtgagtgccactctctccccataccaaggggtctcaaaatctaaattcctttagtcacttcatcggtggggtcccttaacgtgccactacacattatgctgaaaagtctttgttggcaaagaaggcagctctaagaatgtctcctgcgtgggtgccctcgtatgctgtgaagacagactatgctcaggagtggaggccttcattctctgtggtcacgacacagggtggggtatgctggccacagcctctacccttccagaatcagagaaccatgccttcctcctggtccaagactgtgagtggttgggacatttgactaaagccagaaaaaaatgtatctctgcccccttttcctcgaaagcaaaaagtgagttttatcggtgatgaaactcagaaatgctcataaccctgaattaccatgtatgggagttgactgcaactgtggtgaaaatcagaccagaggaggaaggagatgcgagattcctgcttctacaaaccttagagtctgacaaagcaggaccttagagattaaagttcacgacccctggccagaaaggacagtgggcaggctgggagagcttcctaagtcctggcttaaggttacctcagcggcagagcccaacaagggaagggagaaacatcacccttccaataagcaagtttcagaatagcagggaggctgcgggtggttagcagcccagaagagctgcagaggagtaaaagatgaaccaatagatgcccaaacatgtggcctgctggtgtggcacagggtgagggcgtggctttactgggagccagggagactcctctcagcccagaacagccataacccagtggagagaattagtgagagcgtggaccagcgaccaaaatccagtttgcctgacacttagcttcctcccagtccctgaagtgtcccatccacttacagtcttggaccaggaggaaggcatggttctctgattctggaagggcagaggctgtggccagcatgccccaccctgtgctgtgaccacagagaatgaaggcacccactcctgagcatagtctgtcttcactgcatgcgagggcaccgacgcaggagagattcttagagctgccttctttgccaacagtcagctgaggaactacgcaccctgagctgaaagaggaatataacccagaagaaagcaacatctgtgcaaaggaactttaggaataaaaggagcaaggaggatgatgatcagcatgttgatggaggccccagaaaaactatgcccaaagcgggtcaaaatgatgagttcggagctcttcataccagtgctcaaggcaagaggggaggataacatgagtgggaacagtgtgcttcaggactgtcagtgcaaggagaggaagcaggcagaattgatccataaactcccacctcccgctgggtagtggttcatagggtataaatgcccagcacttccgtgtcacacatgtgtggatgctgcacaagttttcctgatgttccatgcctcggccttaatagcaaagcctgaggagggaggtgaggggtgcaaggctcatgcctgaggcaaggccccgtccggttgtgcctgcaggaagccaagccgatgaccacagatctggtggctgcagtgatgcctagagcaagagacacgttggctaacatgtgcatagtacataaagttaaggaggtaaccatgaagagaaattaaaataagtttataagcttctcaaattatcagaaggaaaacatttgaaaggagataaagaaaataggccatataatgacacatttttaaaacaacaagatgcattaaaaattttaaaaagcgtaaacaaaatgatgaaccaactaagaacaaacatgaatgtcttctgcgtacataatttgcagatgagataaactcttattaaaggaaagtgctctcagattgtatcaaaaagcaa[137 bp omitted]catggtgaaatcccgtctccaccaaaaaattcaaaagttagcctagcatggtggcacatgcctgtaatcccagctactagggaggctgaggcaggagaatcgcttgaacccaggaggcagaggtttcaatgagccaagatcacgccactgcactccagcctgggcaacaaagtgagactgtctaaaaaaaaaaaaaaaaaaacaaccaacaagtgacaaacagaaagggaagagggaaaaataaaaggatggctgagctcatacctggcaagtgcagtgaaaggcaaacagaagtcaaagcatcagtatccaccaaggttgaatttaaggcgaaaagcacgaagcaagaggccaaaaagagcctttcacaaatggatacaatcttaatgatctgtcatgaatatttttgcatccgtatgtggcaatgaatttattttagaaaaaacagaaaaatcaaaggaaagaagagataaatacaatagtaatgggtaacttcgtttctcagcccatgatagattaaatagataaaaataagtgaacctaaaagtaacaaagtaattaataaagtaaaattaataaattatgactaataaagtaaaacaatgtaactgcagctcagcaatggataagacactcttgctatgcctgaaacatctgttggaatgtttatcaaagtggccatataggatattaggacataaaataacacttaatacattccaaagagtagaaataataaggaagacactctctgattgtaatttgataacatcagataataataacaataaaatataaccaccacaaaggcctgtcacttaaacaatcaaacacccccaactcccaaaaaacacaccgttatgttaggaaatctaaagcaaaattgcagaatattttcaaaataagatcaattaggccgggcatggtggctcacgcctgtaaccccagcactttgggaggccaaagcaggcggatagcgaggtcaggagatcaagaccatcctggctaacacggtgaaaccccatctctactaaaaatacaaaaacaaaattagccgggcgtggtggcaggcgcctgtagtcccagctactcaggaggctgaggcgggagaatggcgtgaacccgggagatggagcttgcagtgagccaagatcacaccactgcactccagccttggcgactctgtctcaaaataaataaataagtaaataaaataagaccaattaaaatgctatgtggccaggtgcggtgggtcacttctgtaatcccagcactttgggaggtggaggcaggcagatcacctgaggtcaggggttcaagaccagcctggccaacatggtgaaaccctgtctctactaaaactacaaaaattagctaggcatggtggtgtgcacctgtagtcctagctacttgggaggctgaggcagaagaattgcttgaatctgggaggtggaggttacagtaagcagagatcatgccactgcactccagcctgggtgacagagtgagactctgcttcaaaaagaaaaaacgctatgtacctaagctgatggactacaaccagagcagtgctcagaaaaaagtcatgatcttaagtatttatgttattaattttaaaaatgaatataaatgaataaatgaattaggggcttagctccaaaaattaggataacaagaagaccaatataagcttaagaaaaacaaaagaaggaactgccaaagataaggacagaaatccatgaattaaaaatagcagaactaacaaatacaaaagctagtactttgttggggcaggtggggacaatacaataagtaagcactagttaacataattaagaaaatagaaaagaggaaagctacaaatatattaaattagaaatgtgagcaagagaaatggccaaagataaagtgacaccaaaggaataacagtagatacagagaaacttaaaataatcaatttcattgaccaaccctcctgcagttacatttgccaccccagccctgcctcaatcatccccacattcatactctagtatcgctatctccagcactaagaaccggttcaagcattccagttctaaagccccatggagacctccagttggagatgacttactgttaactatttatcccctcctttttttttttttttttgagacagagtctcactctgtcgcccaggctggagtgcagtggtgctatctcggctcactgcaggctcagcctcccgggttcactccattctcctgcctcagcctcctgagtagctgggattacagtcacccgccacc[142 bp omitted]cctatcccctccttttgacttcacttccctcctcatcctgcaatagatcatcataacaaccatctcctccttgcctttcttccctgtcctcttttctaaggaaatctaaaccctgactgatccagcatccatcttctaggtgtctccactcaggcaactgaccattgctcaaatgcatcacacaacgaggatggcccaggaaggcaggatctttcctctgttttaggatagtgtgtgtgtgttgaggggcgggtgtatgcacacactcatgtatttttggaactcccagagcctcccaacctcaccctagcagatttcagaagttacatgtggtttaggggaaaaaaaagcgtcttcagggatgtggtggccagtttccaagatggcgcccttgatccctgcctcctgttattcatgttcttgtgtagccaccccccacattgtaccacggtgggtctgtatgaccaatagaatattgcagaagtgataatatagcatttctgaaattaggttataaaattcactgaggctttgagcttggtctctctctgtgtctgtgtgcctctcttttatcactcacctgggggaagttggttgccatccctttggagaatcccatgtggtgaggaaatgaatgaagctctcttccaacagccgcatacgtacatttaggagagattccttcagcctcagtcgagctccagctgataccatcattgcagtcttgcaagagactgaggcaaagcaacccagctaagctgccgccagattactgacccacagaaatggaggaaataaatatccgttgttttaagccactaggtttgggataatttgttgtgttgcaatagataagtaatgcaaaggaataccacaccagcccatgtttggggatcattgctgttcactgtgctgcaatgtggctcataggctgaagcccacaggaatgctcagaaaatgggatcagaagcacatggctgtcagccatggtgtcacacgccccacctggacagtcatggggaaatgaggtattctttgtgagtgctttgaggctgacacctgcccctcgggtgttaccggtatcgtctgtgtttcaaatgattattctgtgtgttaatttcaaattttcattctgtgtgtgtgtgtgtgtgtgtgtgtacatgcacccacacaaacacactttttcttgcaagtttatttgaaagtaaattgcagacatgatgacacttcacctcctgagtacttcaacacgtgccttccaagtgtaagaatcttctcttacacagcacagttatcaaacaaatgcatttggcattcaagcattaacatcgtctactatgcagtccgtattcaaactgtattcaaacagttcttgaatctaccaaaactgtctcttccagcctaggttcccctgaaaaatgagcttgaggcttgtcccctggctcctgtctctcctggtcagtgatgacctcaggggcattaacagccttgcacatccagcctggacatgggcattccatgctagggggctcagagaaacacccaggctgaaatcaaggggcccatagcagctcaagcctgaagagagaccttgtcagcccgcatctgcataaagctgattaaagccagcatggaatgttgctaaagcaatggctagagagagggggagctaagagaatttggaaagacatagaaaaggtgtctgatgcaatgtctcttataccctttcctcaattttgtgaatccaagactaatcagagatttgattgtcaatcattttgcattaaaaaagatagagatggggtgttgtcatgttgcccaggctggcctcaaactcctgggctccagtgatcctcctgcctcagtcacccaaagtgttgggatgataggcgtgtgccactgtacgcagcccactttgcatttgattgtcaattctcattagactctttaatttcaaaatatcttcctacctttaaatctttaaatctttatataaatatatgaaatgctttaaatcattatatatgtatctatatattcatatatatgatgacattgtcatttttgaagagtccaagtcatcagaatatgctaattatgtcttcatgattagactaaagttttgagtagagtatcatatatatgttttgtacttcccattacgttatctcaagagttacataatgtcagtttgtcccaattttggtgatgttaaatttgatcacctggttaagttgttatccaccagctctccctgttgcatgagtacattttttttttttttttttttgtaattaacaagtaactgtggggtgatacttggagactgcgtgaatatcctattctcccacatcatctcatccagtggttttgatgtccattgatgattcttgcctatatctattattacattgttggatgcaaaatggtgatttgggcatgcagatttggagagatttgagatgacgaggctaaggttcagagaggttaggctaggacccaaacatggggctttctgactcaatgtctagactgtttccatttctccctgctgtaagatggcctgctccttaccctttacctttgcatgacggggcatggcagtctcgctgcaggaccggatgccatgacacctggatcctcaacatcctgcctgtctggtagagggctatgaagatttaagactcctcaaggcctcaggctcctgcaaagagacagcaagagaaggaggcatgaaggatggtgggggtggtgattgatgtccatgactcactacagctgttgggcatggataccatcacgaggaggaatctggagaccacagtgtttgaatctgcatctgggctggtggatcaggacttgtcatagcagtacctctggtcatgtctaacatctcagccaccacctatccacacacaggcgtccttttgccccaagagacttatttcaagcctgttgctcctcaaggaagtacctcaacatgccggtgtgcatatgtgccacgctgctagtaatttgttactaataataaatgactggcatttgcaaatgctttcatcttttttaaaaaaataaaaattagagagaattcaaggtgatctctataacagtctccaaggtttgccttcttgcatggaaagtgatgacgttttatctgtgagatggaaattacacatgagaatttgtcttgagtgttaaggggaaatgtgactaagaactgacatttcaatagaaagtatgtgggtatgtcatattttcctactccctggatgctgatagtcagtggtcaataatctgcaaggtactgactattaagagattcagggaaaactctggtgacaaagacctctgttctgcccattatccagaaaagacagcccaaataagtagcccatttggctggctgagctgcaggctcgtaggtttgaaagcctgaaggagcgtgactagaaacaacagctgtggaacattcacagttttcacaacccatcctcacaagtgtctggggtcaggcaatattctcatgatggtctttggatttttttggatcaccaggctgctcagctccatgaagctcaagtgggaaattcaggtaaccaacctttctggtttgtctgggactgttccagtttagtactgagagttctgcatcccaggagaccccctattcccagacaaaacaggatggttggtcaccataactggcatagaatcctgtctagatctgagaaagccactttcacttatctggaaaatatattgcatcagtcaatctgggataacttctggctttggtccctagaggaagaatgacactcatagcgagtcaaaagaggaaattctgccttgtctgcaattcggttcacacttcacacacatggtatcttctggaaggttctctgtgcctctaggtccacatatgcacacccatgcggtgcatggcaaaattccttgcagtttaacttggcaccaattttgttcgttcgtttgtttgtttgttttacaaaatagctcttattaagctcacaatgttctactgatttctaaacctaggggctcctctctgtcatcatcctatgtcattcaacagtcacataggaaatccagaggaatgactctgtggacaattaattagaattaataagtgaattttgcaagggcgctggattaaagctcaatataagtcaattgtattcatatatactagcaataaactactagaaaagtaagttttaaaatagtgtttattatagcatctaaccccatcaaacgcccagaaaatacctagacgtaaatctaatcaaagatgtgtaagaaggcactctctaacaccggagattcttaagcttcagcgttcatcagaatcacccagggggtttattaaaacacaaactgctgggccacaaacccggagtttctgattcaggcgttctggggtggggctggagaatttgcataccttgttgtcagggggagctggtgccgtcggctgtggaccacattttgagaacttctgctcaactctgaaaactagaaaacatgcacctgtcactttctgagggttcactccctggaagtcttttcatccttagttcccgaggcaccacatactcctggtttcagtcctgctccttctccttcagttggctggttttctcattctccacccactgctcagactttcagctcctgcgggccctgtcctcagtgcccatctcactttgcacaccctccatgggcatatacccacacttgtgttctctgatggttcataagtttccagcccatggctctcctgggagctccaggttgtcacgtttccacccaccccctggacagttccagttggatgttctgcagcttctttagcctgcacggcccaaactgaactccttttcttctctataaaccttctctttcccgtcttgttcatgtttgaaaagagatcaacttccccgttcaactagtcacccaaacaagaaactagggcatcatcccacacacttctttcccaattcctacctcacttctaggagatttgcaggacagaggggagaggggcctggctatcccatagcacttccactggtccctgtgttgagggtgagggtgaaaattaatcacaaccgtgcgaacagacacaagaagccatataatgatcaagatacagtaacaactttattacaacaggggtgcattggtggactcatgttgcactgagcccgaaatatgtcatataagtctttttctcctgaattttatttaccacccagtgagggctggaatgcctgaagaatctgggctccccctgggtgtgtatgtctgctggtggattcgggaatcctgcccctgagcctactgcatagcagaagcagctggaaggagactgctgtggttcatgagaaaagctgggcagtccttggttggtggtttttctttacaccaacttctccatcagataagagtttcctcttcttgagggaaggagttaagagaaagatgaaaaaatattcccccaatcctgtcccattctgggaagtggaatggaagcttcctctccacagaaacacaaggagagggtgatgagcattccacccctaaaaggccctgtatactcttgaatgagtcactgaacctctttgagcctcagtttccccatctgtaaataaaggcccttagaacaaaagccgtgaaggtccttccaagctttcagatttcattaaatcctatgaatatggaaaggctgtgcttctacaggttttccagctgagagcctgcaggtaatttgtcatttaattactccatgagaagttggcagctcagccctctctgggggcccagagaatgctcctgcaaagatcagtgtggcttgcatcctacatggctgagaaatgaaaggagtcagaacacaatccaacgcagtgtctggcagacacaaaaaggaagattcgcatctcatttattcttttattcctcatgtagatatccagcatctactggggaccctttgttaagagttggggtggctgaaatccacatagcctaggctgtcagtcaggtcagaatacagccagggagttaagagataggcacaaccaactgtttaaaacacacacacacacacacacacaaagagtaatcagggctctaagaaaaatagaaaagaaaaaccctgtaaggtcagtgctggaagggcagggcagctcctgctaagagggagcagagagggaagccttcttggagaaggtgataatagctcctgggttagaaagctctgggcctgcagagactggctgtgaaggggctttccagggggaagaatgacatgagctgaaacagaagcctggtagcatggggacaggaaagaattctgtttcacctgaacggaaggcatggaggggaagaggcgtgatggatccaagacaggacgttgacctcaccctggagatctccctcatgcccattccctgtccatcccccagccccaaagcaacctccaatctgatttctctctccataggccagtcttcctattctagagtttcatagaaatgggaatcctactgcatgttctcctatatttggcttctttcattcgacaccctacttttaccgggcgtggtgactcatgcctgtaatccccacacttcaggaggccaaggtgggcagatcgtctgaggtcaggagttcgagaccagcctggccaaaaccgtgaaacctgtctctactaaaaaaaaaaaaaaaaattagctgggcctggttgtgggcacttgtaactccagctactcgggaggctgaggcaggagaattgcttgaacccgggaggcggaggttgcagtgagccaagattgtaacactgcactccagcctgggcaacaagagtgagactctgtctccaaaacaaacaaacaaacaaaaccctatttttgatattcatccacgtagtataacatgtatcaatagactttgtttctttccatttttgctgagtagtatttcactgtatggctgtgccacagtttatccactctcctgagaatggacatctggattacttctgttttctgactatcatgaaaaagctatgaacaatctcatacaaggctttctgtggacatatgcttttatttctcttggataaatacctagtagagaaacatcaagtccatagggtagatgcatgtttaactcttaaagaaattggcagagggtttcccaatgtggcccctgtccctttctagctaggaatttctctttgcttcagaaataaagctaggaatttctctttgcttcagaaataacaggacagacacacattttaaaaagaagcattctccgcttctgggcttctcttgtcccagacaccagtgactaagccctggaaaaatatcaaaacaattctaaaattaggttctcgttgcaacctgcacgtccagctgttatgcttagcatcctacctcccctctcccgaatgaagctcattccatgaatattcaaaataatcggtgttgcatctttgaagactgcctcagtcccagcttcaatccttccaaaaagacctgtcatgtgtgtgagtgagagacggggtagttcaagtacagacagtctgctctgagcagacactttctgtgaaagcctgaagactctgaagctctggtgaattggccagggagtggagaaagccgcttctgccagtctgcattttctacagacttgttcttataccttatgtttattgggttcttacccagccatctcataggaagaaatcccttagaggccatctgtattttacaagtgaaagtttggagagaaaaatgccactgtctgcggttgcccagggagtgcgtggccaagctgaagctgtgtctcttcagttctttctctgctgtagacctcaactcctcccaattttagtgggtattcattgttcctcttccccttattaaagctcatccctgcatattagtgcttctgtccttacctaaaagcaaggtcaggaggttgaaggaggtcatattccaggtccaggtctgttctgcccaggcacacagaatcactgtggcatgagttttgcaaaagagaaaggatttatttgcaagggcaccacgtgaggatgcaggagaacatctctcacatccgtctccccacaggtaagccttgtggatatttatgggctagagaagtggagtggtctaagtgtggggaatggtgattagcagtggaggaaaatgaagtaataagttcattctgtgcaagcgtagtcagggttcatggcatttcatgggacacaggtacagaaaatgatggtgttagcatgatctgagggtggagggtggagtttttggccctccgatataaaaagaccaccgcttggtcacttgagcaggcccagttgaatggttggtgatgtccactggttcaggagctagccctagttcctgaaaaacaactaaagcaatcattaccatgtggcctgcgaatgttagctataaagtagccagtgaaggttaagttgcagcattcagccccaaggccttcagctaccttaagcttcatggaaaaagaggaaaaataataagaagcaagcaactaaaagcaagcaggcaggtagacctggtgaaattagcccctcagtttcaatggcagcatggcaagagagcccttcagggagtgtctatgggcgaaggtgctaaatgcatctctgttgaccaccgtctctctcaggttcagtccttcagtgagggccaactcttgagacaccgagaaccttcttactcccagcctagaggagattccagaaatctgagctcctcccagagccagaaatggaggcgagttctggtgcctggaacccagcccttttgcattcttctgggaataacaaaagccttctgcctatggcctggagcacagtgggttgttgaagggccatctctaaggcatatgcagtgcctggcccaggctgagggatggagagaccgagctccctcattccctgatgcagcgtgtctgtgcatgtgtggctggggcaggctctgctgagctccttctgagggcagagccagagaacatccaattcttcccggcatcttcttggacttctctgggcgtgagctccgctctaaccaccctgtcaagaaagagggcaggggaggtggccgagctgctccccaccttcctggagggaggtttttatcaaagttctgcaggtccagccaaagaatactcttccctgagctgtgcctctaggagcgccggggtctatgtggggacgcttctaggcaggagctgcccttatgggtctcaccactcctcgcacccttatcctctttccttcctttacccaccaggatggtgtcagtggtggtcagggtggaaagggaaatcccttcttcaccacgggtgtcatgcccttgactcctgactgacaggaccttctccaggtcagtgactcatctgataaccttgggtcagtcccagccccctcctcgttcctggctccacatagttctgtgttactccaggggtggtgccaaggcttccataaggccacaggtatgactggagaagcttctgcctctgtgaggacccttgttggaggaataggtggcctgagggtccatgggttggagcccagagtggatgtatctgaggtcatagcttccagtcacttaaaaaagcccattagatttaggacagtcaactccgtggccacacagagagtcctgactccagcagaaggacacctctcccatccgtctccccacaggtaagacttggggatattttggggctagagaagcggagtggcctaaagtgtggggaaaggggattagctgtggcgagaaatgaagtaataggttcattctgtgcagcgctccaaccctggccccactgcatcccaaccctggccatgggactaggacctgggagccacagggtggctgtgttatcaggaacaccagggactcacctgcgctctctccaatctgcctggccctgaatatccctgcggaccaagtcatagctatgacttcctagtgtctgcctcccaaggtgattttattttatcctttaagcgaaaccttgtcatgcattagagccaggaaattacacccttcgctgagcagcctctgggctgaaaggaagccaggcaatgtgatgagtgaggccaagagcagcattaatgcagctggtcatgaaagtcacaggaacgctggcagctgccacccagaccaatccctgggggtgccacgtgtaccctgggccttaaggggactctgcgtcagtcagagagctggtccagagagggtacgctcctctcatgccagtttctcaggttccttggaggggagacataggagcccctggcagcagcaaaggtggctccttaagctgcactaccatgggtgctggccacgtcagcgactgcagcagccaggcaagcccttcctgatccacagggcactcacatttgaggctgcctctcaggagagccatgcggtccctggctaaggacatcagcaaagaaagtgcaaatttcagtggtccatggtgaggcattaatgtgctaaggcagggacttgtatcggatgactttgtggtggggaggtcttttcaagatccaggacttgtcagtgtactgtggaatatatgagttattaaatgatgactgagcgagtggatatgtgaatggagtaggcattctagaggcaggaaggctatcctgggggctgcctgggcagtgtgatggagatgactggcccattccacagccccttctgtctgatggctttgcgtatagaattaagctgaaaccatggagccacagccacatcaagacataagatgattcttttagatcctgctgaattctttgcgggatcaaagggctttcagcattgcctgtgttcgtcctgtgcctacctattgcttccaaaagaggcagggagagccagagaaccaaagtctgggggctgagtaagatgagatcagggagctcatttatccagccccttcactgttcaagtggggaaccaaggccaggaacatggcaggaatttttcacccagccaaggaatgtccagagaggaagcaggaagtaatagagagtcaggaaacgtacgtgcctgagtgtgcgcgcgcgtgtatgttttggcgttctgttgagaaagatccagcatttcaaatcacagtcagcgtgggtcaaaggaggggtagcgaagcaaagatattacaaaatctttctgcgctctgcaatttgcttcattttctggattccaattttagacattatttcatcatagaaagccagaagataaacccaataaactcaagtcctctattgatttttcctcctcttcagcagtcgctgtattttgactacagcgtggtgaaacgtttagctaaggaaacagaaaaacaaggaacaaccccctccactcccgaggcaataaaatcatcatcaattcactgagacgaataaatttattctcaccaaagaacaagttattaaggatccgctgcaagtatcagtcgggtaagagcctgactgacaatttcatctcctagaatttagtggaaaaggttggagaaactaaaaccttttctcccccatctttccttttccagcctacccagaggtacaagcacaccttggagatactgcaggttcggttctagaccactgcaattaagcaactattgcaataaagagagtcaggcaatttttgttgattttatatggaaccacaagtatatgctatgctgtgtctggcttttggttcaacattatttgtgagactcatccatgttattgtaaatgtcagttgcttattttcattgttttttaatgtttcactgtacaaatagattgaaattgattaaccattctttctaatggaaatttgagttgtttccagttttttgcgcatcacacatcatattactgtgaacgttctcatagtgtatgctacagatgtaactggatgtttctgtcagtcacgtgcccaggactagaattgctggttatagggtacgtatcttctcaatctgggggagaaactcttttccaaagtgattgttcaaacttacattccctcaagtggttcaagagagctccagttttcacatctttgtcagcatttaaagtcttttactttagacagtctagtggctcttattgtgattttatgtgcgtttccctgattagcaatacttttgaacatattttcatagtttattggccgtttaaatatgctcttacataaagggctgttcaaatattttgcctagttttctattattttttctcttatgtatctgtagctgttctaagcatattttatattagtcatttgtcagttgtatgtgtggagaatatctttttgcacattggtttgcctttttaccctcttaatgatgtcatttgacaaataatgttcttaatgttaatgtagtccaatttatcaatcatttcttttaagttaagtgtctttgtgtcctggttgagaaccctttgtttaccccaaggttataaagacagtttcctttgttgtcccctagaagcttttctgttttacctttcatatttaaatctataatccagcttgaattaattctgtgtattgtgtgaggtaaggtacagatcaacattcatttttaccatatggatattcagtcattgccctatcagtagttaatgagaagactgtccttttcccactgttgggcagtgccatctttgccattaaccaatcacgtgtgtacacacatacacacatatatgtgagtcattttgtgagttctttatttgtgccttgtgcaaatacaatactatcttaattactgtagctttctaaaaaattaattaattaattaatttgacatcagacagtgattgtcttgg[139 bp omitted]cctc[224 bp omitted]acatacagcaccttctggaattttaattaatattacatcaaatctatagattaatttggggagaattgatgtttttgtaatatggagtcttctagtccataaacagagctcatttatttagggattctttaatttaactccatgtcttacagttttctaggtagaggtctcacaaatattctattagctttatttctaagtatttgaattttttgctattataagtgttatacttcaaaaaaattttttgtttgttgctactttgtagaaacataatttatttttatatattgatcttgtattaagtgacctgactgaattcacaatttactctattagtttatctgtagactcttttaaattttctatatatgcaatcatgtcactggtgaaaaatgaaaaatcatgtcattggtgacaaatgatagttcagtatttttctctctaatcctatacagtattttcttgttgcactaactaggatctctctaatgtaatgctggatagaatttgtgatagcaaagtatctccaaactctacgggacacttaatattttgctattaagtataataatattcctgtaggttttttaaactaacaaaattcctgaatattcttaattttctataagtttttcatcataaatgaatattaaatttttagggctgggtgtgctgactcatgcctgtaattccagcactttgggaggatgaagcaggtggttcacttgaggctagtttgagaccagcctggccaacatggtgaaacctcgtttctactaaaaatacaaaaattagccaggtgtggtggcgcttgcctgtaatcgcagctactccagacgctgaggcacgagaatcacttgaacccaggaggcagaggttgcagtgagccgagattgcgccactgcactccagcctgggtgacagagtgagactctgtctcaaaataaataaataaataaatagataaataaataaaataaatttatatatgcatttttgcatttattgagatgattacataacttttctcctgtatttcattaacatggcatttcgaatccaggctttaattgtttaaagcttgttctatttctggctagccattactctttcaaggtgacccttcaggcgtcctcaccaaaagcctgggatatgatgaagcctcctcctctttagtggaacctgaattccaaattttgtccctccaagtgtatgagaccattcgctattctagaaaatgcatctgcctttatgtttttgtacctgtaatttacctccttaggataaactcccagatgtgagatttgctgactccacgtatgacttgggaaagtttacatttctctcacctgccctttagaagagccctttctgatgagccacatgcgagattcctgcacatttcaccacaaggactccagagaacccggcatccatggctaaagggcaaggttttcagctttagggaaatactaagggactaggcgcagggtcacaggatgagcaagccacagcaagggtccggctaatacaaggttatacaccaacagaatacagactgtccccttcttccttccatgaccagctcatgaaattctagctgaaatactgaaaacagaataaattcattcacaaagccatcagttgttaagttcagttttgctgtttccaacggggcaatttttttctaactgcatcagcttatttagttttcagatggctacttggacacagacatttaaacttgtgttgatgaataatttaaaaggaaaatccagcacggctagcagtaatcagctcctcatcagctttcctaatcatgggtcctcccttctcgtgcccttcccaaattcaagagaggtcacctatgtttggactcagtaaatgatggaaatctgaaactctcagggatttgcctgttaaggccaaagggagacttaggtaataatttatcctaatgacctttcattagaatccctgaggccgggcgcggtggctcacacctgtaatcccaacagtttgggaggttgaggcaggctaatcacaaggtcaggagttcaagaccagcctagccaatatggtgaaaccctgtctctactaaagatataaaaaaaattagccagatgtggtggtgcatgcctgtaatcccagctactcaggaggctgaggcaggagaattgcttgaacccgggaggtggaggttgcagtgagccgagatagcaccactgcactccagtctgggcaacaaagggagactcctctcaaaaataattaattaattaattaattaaaaataaataaataaaaataaaaaaataaaattcctgagagcacaggaaaaagcgctgggatctcattccaggttaggcatcgtttttgtgacagggttaagagctggggaaatgcctaactgtcagtgaagcggggatttcaagcctggccagcttgatattgactctgaagaagatggtgatctccctggctgccaaaaggtgtcaagttagtccagctgggcgtgacggggtgttttgatagagctcaggtaatagccatctaggagattgggtgggtgatggaaacaggactctagttgtagactccagccccaggggaaacagatgacagagaacagacctgaagcccagagtggactcttcaagccacgtacaggcactggggaccaggcagtcactgggctgtggggcaagatggtactgactctcgggaggcacccggacccaggaggtagcagctctgggaatctaagtcagagcaagatgagcctctcttgacctcctgcctcaggactcatacaagggccagagcagaactgaacctgcaggtgggggatgggatgggggtggcctaagtggagaggaaaagccaggtggctcctgggtggggctgccaaccttgatgggggtctggaaatcagattccagaggctattcggatgttcagatacttgtgtgaaggcagcccttgctcaggtggccttcttgagttccacttgaaagacagggagatgtggtttaatgaaaccatactggttggagtcatacagactaggtttgattattgagttcaggactattcaacaaaaatgttctgaatacctacatgaaccagtggcagggaaagacatagaatatgtaattacaaaagaggcaaatgctacaaagtgggagcatgttgggaagtagggggataagaaaggctcccacaagcaaagagactgtggcgtgtgtgtgtgtgtgtgtgtgtgtgtgtgtgtgtgtgtgtgtgtgtatggtggtggtggttgtggtggtggtggtggtagtggagggaattgggatatctcaagcagcaagtacaacatgaaggaggttctgaaggccagacagcagcccacaagtgaagaaaatggtcctgtacatctggagagaagaaagactgggacgtgagtggtctaggaagaggccagagaggtgggcaagagcaggatccctgcaggcctcagaagccttgtgaagcattttggtcctgatggattgggccgtggggtaccactaaagtgttgtatgcaggacagtctcatgatcagacctgggttttagaatcttgctatgcaaagtgtggactagcagagtggccatcacttgcgagtttgttggaaatgctgactttccatcctgtattagtctgttttcacactgctgataaagacacacctgagactgggaagaaaaagaggtttaattggacctacagttccacatggctggggaggcctcagaatcatgccgggaggtgaaaggcacctcttacgtggcggtgacaagagaaaaaatgaggaagaagcaaaagcagaaaccctgataaacccatcagatctcgtgacacttattaactatcacgagaatagcatgggaaagaccagtctccatgattcaaagacctcccccttggtccctcccacaacacgtgggaattctgggagatagaattcaagttggatgaggccacagctaaaccatttcacatcctcaccctggacctgcattttaagaggatctgcatgactcggatgcacctccaagtttgaagagccctgctctcccaagttctcatcagttgttcttagaggttggatgggagggagccacaggtgagcatggtggtgtagtcaggaagctgctctcatggttcaggagagaaatatggagacttataccaagcctgtgtcaggagggatgatgtccccctagggcagatcagaacacatcacacccctgctcatatccctccacttctgcctctcaaacatcccatttcttgaaatggaactcccatctcaaatggaacacttgcctagcagagttctgcactgcctctcatgtctgtctccttctccagccccctaccactgtggctcagagtccctctccaatctcccccaggcagtgacagccatcttccaattggccactgtggccagagcggcccatcaaagcacagcattgactcaggagctccccagctcagggcccctggtggctcctacctctccttcatgatcaagtccatgcctctcacctggccctcagcgcctttcacaggtggggccatccttcggttacatctgcatctcccactgcacctgagtggatcctggccctcaagtcaatgtaaccatcctctactccaggaatatgggtgctttcccccactcccacctcacgcgagccttctggaatgcccctgtgccacctcggccctactctccatctctttacatgaaaagatgacatttgttattgcattttctggttactaaaatattgtgagcatattgccactgttaggaagacattgaaaagtataggaagacagtgaagctctgctgaaagcccatcttgcagagacagtccctgtgtagaatttgctgtggctatttctcagccacatgctctgaaaatccactgctgacagcagcctccagcagagctgggaaaaatcaggccccagacaggacaccagggtcgctgttttgtgcctcctacagatgtacggggcaccacattacctgctcacaaaaggtgtctaacacactgtaagaaagtgtatgcacctcagggctctgaaaaaggcagctctatctcagtagagcagtgttgggattgttaatggctggagaggtggcaggtggtgcagaaggctgggctcagggcgcttgtggtgtgtgtgtcagcccctgacttctcccaccctgcagctccaggccccaccatccccactctgtaggttctcttctctctgccccaactctggcagcaagccaggcagcatgcctttagttctgtccaacaaacactcttcatgctcagctctgcgttaggagacactggggacacagagcaagccaattatccctgtcctggaggagctcacagcctggtgggtgaggagcagctgtctccccaggctctgatcctccaccaggagcttctgtaagctctgagggtaagctctggaccactgcatttccaagcagcctctgccgcctcccggctctcaccaggtgcttccactttccaggcccctcaccgggacagcatcttgctctgaactcggtttgcgtggctggcactgccaacccttcttagcactagtggtacctccaagccagagagttgcagcagaccctgtgagtggcagacaagccttcatggggaactgtggtcacaatcaagaggcagaagagacaggctcccctccatcctcccatctttgtggctccaggaacacagagaattcctccaacatctctgcccagttgtttaagggctcatggcagggaggttagacgtgtcaaaacaagcctacacaaagtaacaagcattacaaagagaaacacaggtgtcaaaggagtagctttaactttggaaaggcaaagaaagttcttacagatggggtaacattcaagctgggttttgaaggaagagaaagaattttacaagtgacgaaggagagaagggcatgttcagatgtttattccagaaagattcccccatgctacttagctcgaaggagggactggacgaaggttctggggaagcagggaaaccagcaaggtggctgatatgaccctccagctggagatacactgaagccagcagaggatgggctttgaaggtgagggaggcagcagacactggctgggtggctggtagctcctgggcaaacgctgacctggagatcctgcaggcggccaggactcaacgcagagccagggggcccgggactcctgctctgagccccactgtggtgggtggggatatctaggcatttgaaggaatctcagctggtgggagggcaccttgtaagtgatcttaagcaatgcagtgcatcctttattaagagaaacggtgacacctctgctgcttgctttgggtttgtttatctgcatcctgtcacctcccccaaatgggatataacacagaactgcaattattttgaaaaccctaaattggctttttttttggctaggaaaatctcacttgatacaattaattcctatcctagaggagcagttagatatctgataggaagaggagttgagggcgaggtggctgctcccctcagttcctctactgtaatccagttactccaacattgatcaggtgctgccatgcttcgagcaggcggctgcagagccccacccccggtgaggaccccctctgggccctatttgagctcacagtctaactgggaaacagaaataagctaataaaccaataactagttctggtacgaagtcgattgagcagagagccagggaatttgagggagaactttgaaggatggcttcctggggaaggtaagagtagatagggctgggccttgggacaggccaggcccacgcagagtgactggggaaagggacggcctgatcaaggttcagaggtgtgaaaggagggagtctgttcaggaaacatgggtagatgggtgttgcatggtgtaactcagggttccccaaccccgaggccacagactggtagttgtctgtggcctgttaggaagcaggctgcaccactggaggtgagtggtgggtaagtgagcaaagcttcctctgtcttttttgtttgtttgtttgcttttgttgtttttggaggctgagtctcgctctattccccaggctggagtgcagtggcacgatctcagctcactgcaacctccgcctcctgagttcaagcgattctccagcctcagcctcccaagtagctgggattacaggcacaggcaaccaagcctggctaatttttgctttttttttcatagagatggggtttcgccatgttggccaggctggtctcgaactcctgacctctggtgatccacctgccttggcctcccagagtgctgagattacacgcaggagccactgcacctggcctgaaggttcagattttaaagagcatggctagagaaggccccggtgagaaagtgaccaagtgcacacctacctgaaggaagtgagaaggtgagttgtgtgggtaccaggcaaggggaacaatagatgcagggacttaagcgggcacatgccagaatgtctaggaagagctggcgggccagtgtggccagagcggggagggcaaagggacaagaaagacagctcaggggctcaaggtggggcagattccaccagccactgcagatcactgtcaggatctgccttttgctctgacttactccgatgggagggttttctgcagaagagtgacacaatctgacttacttttaaaaagagtcactctgggccgggcgtggtggctcatgcctgtaatcctagcactctgggaggctgaggcgggtggatcacttgaggtcaggagttcgagaccagcctggccaacatggtgaaactctgtgtctactaaaaatacaaaaattagccgggcatggtggtgggtgcttataaccttagctactcaggaggctgaggcagaattgaacccgggaggcagaggttccagtgagccaaggtcacaccactgcactccagcctgggcaacagagcaagaccctgtctcaaaaaaaaaaaaaaagtcactctggtcactatgaaaaacagactgcagaggtaaaaacaagttcagaggtgactgcaatcatccaggggcaaagtcatggtggctccgcttggaccaggtgtgggggcagagggggtggtgagaagcgatcagatcctggatagagtttgaaagtagaggtgaataaatttgctgatggcccagatatgagatgaaagacaaagaggagtgaaggatgacaccaagctctttggtctgagcatctggaaaatggaacggccatgcagggagataagaatatccgtggcaaggatctggcttggaggcaaagtgtaatggggacagatgatgtgtaagatgcttgttagtcataccgcttctccctacttcattgctgttacttcttctgctaccaggtcataactctcagttttaccctgtttaccaaaacccccaatatgctgttccctttgcacaaaatgtccttctcatcccatgccccctccagcaaagtcctcagtgaggtggcaggtccccctccagcgaccccagccaggtgaatgtatcatctctgacagccccttattccttttgaacaggctctgtcttattgctttataagttctctctgggcctatttgtctcttgagacactgagctctttgagggagccgtgcctaatttacatctggcattagggctgttccgtagggtgtggaggttaagaataaggaccacagagtcaaacagagctatgttggaaccccaggtctgctacttattaataagccacggtccttaagcaatttagtcaactactccgagcctcagtttcactagctgtagaatgtcttagtctattttgtgctgccataacagaaatacttgagactgggtaagttatgaagaacggaaatattaatatattctcccacagttctgggggctgagaagtccaagatcaaggccgtagcatctggtgtgggccttctgactgtgccctcacatggtggaaggtggaggagcaggagggaatgagctcactcctgcaggccctttttatagcagcattaatccattcatgagggtggagccctcatgaactgaacacctccccaaacactccacctcctaacaccattgcactggggattaagtttccaacacatagattttgggggacacattcagatgatagcatggatgataatagtcgctttgtcctaggattattttgagaagtgtataaagtgcttggtgctgggcttggcatgtattaatccctcattaaatgctcacataacttaataataaaaataataacacgtttttttttttttttgagactgagtcttgctttattgcccaggctggagtgcagtggtagaatctcggctcactgcaacctccatctccccggttcaagcaattctcatgtctcagcctcctgagtagctgggattacaggtgcccacccctacaccaggctaatttttttctttttagtagagatggggtttcatcatgttggccagactggtctcgaactcctgacctcaagagatctgcctatctcagcctcccaaagtgctgggattacaggtgtgagccaccgcacccagccaataataagtgttctttatgaagatttgtgaggggccagtttggagggttggatggagggccaggcaggccagtgagaagggaagctgagcaattgtccaggtgagaatggtgtggccagggctaagacaggggcgggcagatgacgtaagggctgctcttggggttgagtaagcaggacttggtgacattggtcatcggtggtcgaggaagggagaaattttagacaacccaggcttgagctctttctgagccagctttgaaattttaaaccgctgtgttttctcacttggtcaaagtcactcagcgctgagacttcccccactgcgggctccaggaggcctgacctttcagcagtatttacagtatcgaccagctaattttagacactaacaccagcaggataatagggtaaaaggcgacctcactggagctgttctagccggtgcgcttcccaagatagtgtcattcatggatgaagccggggttcactggatgccgacttcgggcccagcctgggcatcggtggtgtgtgtataaataacttatccttgttaagtaagtaaagagaaggcgccttttccaagggggtggcccccagctttctggttcaggctgttttctggctggacagtgtgccttccccacacccctttagcaccttcctgtttcccagtgtgctctgaccttcacctcagcagcccttcctccaaggctcttctaaggctgggctcccaccttggcagggtcttcctggagcagaagagagccagaggtgggaccacagcatccctggggtggcattccagcagtcaccaggccagttattagctgtggcccttaagcaatttgctcaactactccgagcctcaatttccctggctgtaaaatggcgattgtcttagtggagcaagtgggagagacactggtgtaagggcaagagctggctccttccttttccgagaagggttaaccctctaagtagctccttggagcgcagcaacacatgctgtccccttgacaccacctccaggtcgaatgcctctgtctctgtgtttgctggaaaccgtccagcaccgtctggccccgctgtgagcagcctgtcgagctgcatatggcggctcccccatggcgctgccaccggcttctgtgtcgggaacaggctggagcctcccgtctgggctcggacaccttgttcctctcctctactatccaaggactcattcaccttaaagcagttgggaaaagaatgtcctctatgcaggctctaaacctcaaggggtgaagggctggcatggccatttttttctggggacaggttaattcatggagaaacccccagggttttatttctccctggacaacaacaagatgaagtcagataaaccacctgttcgttttgcattgctgtaaaggaatacctaaggctgggtaatttacaaaaaaaaaaaaaaagaaagaaagaaaagaaaaaaaggcttatttttggctcatggttctacagactgagcaagaggcatagtgctggcatctgcttctggtgaggcctcaggaagcttaagatcgtcgtggaaggtagagcggaggaggtgtgtcacatggccagggaaggagcaagagagggggtagggaggtcccagacttttttcttcttttgagatggagtctcactctgtcgcccaggctggagtgcaatggcacaatctcagctcactgcaacctccacctcccaggttcaagcgactctcctgcctcagcctcccaagtaatcgggattacaggtgcctgccaccatgcccagctaatttttgtatttttagtagagatggggtttcaccatgttggccaggctggtcttgaactcctggcctctggtgatccacctgccttgacctcccaaagtgctgggatttacaggcgtgagctactgcgcccggcctcccagactctttttaaccgtcaggtctctcggtaagtgatgagcttgggaagggcaccaagccgttcatgagggatctgcccccataacccaaatggctcccgtaaggccccccctccaacactggggatcacatttcaacctgagatttacaggggacaaatatccaaaccatatcctcaccattcccagatcttggctttgccatttatgttctctccttcacccttccctgtaggcggtggcttttagtgtgaaccctgagaagccagagggtgtaaggacaccaggaagaaagacagggtggaagagcgcggagtgttatctatcaaggctgggctcatgggctctcctctgtgaggagcacggatgatcaaggcaggcatggaaaagctgagcacagcggagcagggttagcaggaggcacttctgctggcagggtgggccagctgctggtggcattctcattattagccacaacgaccctaaacaacgctcacatgcacttaggagcactttgcagcttataatgaatttctgtggtcatttcttcattggaaacttgcaagaggcacagcaaggaattaattagttaaagcattcatttattcagttatagagcccttattggatgcataacgatgtgttagactgttaacttacatcatcagcccctttacaaagaggaaactggagcccaaggaggttaaaaaatctcaccctcagtctggaaagctgggatgggcttgaactaactactcaccatttatctgtgcttggtgcccaggaagctcagctgcagagttgaatctggcaggtccctactctgaagagtccacagtttctgcttcccctgggttctgtgggtggagcagcttagagaagacccaggagacgaaactggtcatccatagcaagaagacatggacttcccagatgatattcactaggggcaaaagtaggcaatggtggtgggcaacttgggggaatataagttgtctttgctttgggagagatttctagactctttcttggaggctttcattactgattggggaacagtttctagcacaaaaagatttagttccaagatataataaaaccacatttaaaaattcagtgaactttggagcatctaaaagctgaaggaaaagagaactttctgataaagtaacaataatcctgctcagaaagcagttgccatggttacgtacaagtctctgggggtgttttttatttggcaagagatggtaaatgttttcccagggtaagtccaactggccacactggcctgagcgatgtgagggagccctggggtccaagccaaatactcctgtggcaactggaactgctgcccaaaggatgggcatagccaggcagaacctgacactcaggaagcctttcctctgctcattgctcaagggagcagggcaaattgagccccacattccaacaataatcattcagtgactatgaggatggcagtcacaaccagctccactgactgggtgctgggcaggtgctaagctaaatgctgtatgtgtcttagttcaggtgaccttgacaatagcctcgtgaaggaggtattattcccatgttacaaatgagtcaaccgagtctcggagaagctaagacacttgctagatatcacaggaaatggtgaagctgaaattccaatgcaggtcacctggacaccaaagtccagaggatggggtataaaccctgtttttcttttttctttttttttttttctttttctttttttcagatggagtctcattctgtccccaggctggagtgcagtggcacaatctgggcccactgcaacctctgcctctcgggttcaagtgattctcctgtctcagcctcccgagtagctgggattacaggcacccgtcaccacccctggctaatttttatatttttagtagagacagggtttcaccatgttggccaggatggtctcaatctcctgacctcgtgatctgcccatcttggcctcctgtttataactaaaagtacagaactttgaggcagcccttcctctgcctcatctcttcccagtagcatcttactagtgtccttctcctaaggtgaggctaagcattattcgccagccagtgatatctctgtccctctcctggttcacctgggcacttcaagatgcctcgccaaatgcccggcttgtatctcagtactccattccaagtattttccgccaatgagccacctggaaaaatacgatctcagttggcagcagagtgaggatgtgagctcaggctccttttgactctcctgtttgagggaccaccagatctgcctctggggtggtggccctgggagcaccaacacagaatgccagtccctgccttcaaggtgcttacagtctgcagggggaaatacacaggcagttacaaggccctcatggtttctcttgtgatacagggagtcatgggaagctatgggacctagaggccatgaatcagctttaccttgcaggcaagaaaagtgttacaaagagtgtagtagccttcggtttgggaaaagaaaagtgccgaaaagaattaatacagtaatacagcaagcttgaagcttctatctttagaagagcttgcttgcaaggtaggcccttggctggagtcatagaacttggcttttgaaacatcctttaactgctaaagttgctttgctttgcctggactctttgcacaatgtgttttatgtattttccttatgggagtatgaaatgttggtagttgctaggcaaagagtgcctatgtgatcaactcccaattacaaacaaaacaaaacaaaaaacgcaccctaaactccgagtctcaaacaggctttcccaggctgaaactttacatacatgttgctgcaatttttgctgctggagaaaaaagcatgctcagcatgtcccttcctcagtgtgtcatgggagggagaggaagcctgtgcttgggtttctccagagtccgtctgatgtcttttgcctgcatagatcttgttgtgttttcttttactgcaataaactacagccgtgaagtcaattatgctgagacccgtgatttcttctagtgacccagtgatcatgtgggtggtcttaggccccctaaaatagaaaagatgaatgagattttaatgggaagaacaggaagagaggggattccaggtataggaaacagcatatgcaaactcatagaagcatgaaagcgtgtggtttgggcaaggaatggtgtggcctgcagctaactaaagggaggtgctgacgaacttgaaaaagttcagaggaactgggctgtgaggtgcgtgagtgctaggccaagggatctagattttatcttatgagcaatgggaaacattgggtatacttaaagagagaaataacagtcagggggatattactgttacaacaattactctagtagccagtgtgtggggctaatcgtgagtgaggaaacaggaggccagaaggcaggccttggaggaggcctggcagggatgcagatgtaacctgtctgagccaagtgctccttagagcctccttgccaaccctcctcctgttccatccttcccattgtccaagaaccctagacccttgcttggctcattctgatagggctggctggactgtgcagactgttgctactatcccagggccttgaagaaaactagccaagcccagttgcatttatggccactcctgagcaatgctcatgatggtctatagggtctaacccagtggttctcaactaggggcaatttcccctcttctcctaaggacatttggccatgcctggagatattttggttgtcacaactgggggtgaggtgctactggcatctagtgggtaaaggccagagatgctgcttaacattctacgttcacgggacagcctccctgaacaaaaatgtatcaggcccaaaatgtcagcagtgccaatgttgagaaactcttttctagattagcactgtccagcggaatttattgcagtgattgaaatgtcctatcattctgcaccatctaaggtaaccacgaaccacatgcggcagttgagcccttgaaagatggctagttgggattgaagaactcaagtttcaagtgtatttcattttaattaatttgatttttgtcttaagtagccacacgtggctggctaatggctactgtatcaggagcatgctgcatcagatctgcatgctcagcaggctgccagcagttcctgaggataacgtccttagtttacactctctggctcccgcattttccccagagcacatcctctgggaagaggggctaccagccagagccacctctgggccagaccaaaaccacaacccagacttgggggttgagcacagctcaaggtatgttctcctggggcttccagcagacctgagtcaggcccatctcagactgcatcgctgaacctcagatgtgagaaagaagcttggctcttgaggccttttttttcccccaacagacccctactttgccacattttctcccagtcaccagctctggaatactgggaggtgcagccatgatcaaacctcagaaaaggtcccttggttcctttcttctgggagagtgagctccttggtgtcccttattccattactaagggggctcctttcagagactttttccaggaaagaaaaaaaaatcggcttcaagatgacttaatgtccctacataggcagagaagacactgacaaattcaaacagccatgtctctggcttaaaaaaatttaagttatgcctaacaaggcacaaaccttagacagagaagaatatcagataaggcttgaatgcaaactgtggcagtggcatggagcagatgtgcatactggatatgcatgagtgatggtggaatgaataaagcatcatgaggtttagaatattcttcttccccttttagaaatgaggaaagtaaagctcagacaggctaaatgacttccccaaagtaacaggacaagtatatggaagaatcaagatttgaacccaagttgatcaggctccaaaccccacactcctttttattctttttttgagatggggtcttgctctgtcacccaggctgaagtgcagtggcctgatcgcgactcactgcaacctctgcctcctgggttcaagcgatttacctgcctcagcctcccaagtagatgggattacaggtgtgcaccaccacgcctggctaatttttgtatttttagtagagatggggtttcaccatgttggccaggctggtctcaaacccctgacctcaagtgatccatcctcctgggcctcccaaaatgctgggattacaggtgtgagccactgcacctagcccaaaccctacactcttaaccacggaggcacctgtgggaaggtgtctgcaaactgaaaaggcagggctgtccaagaaatctcctgaagtcacttgcccagggaaggatcccagattttctggaggcctagacaggctatgatccgggcctacagcatccctaaaacatccaaagaagagatgaacagagatgctctcctgttctgcttgggaaggcagccatgccactaattggcttcagggataaagatgtggtagggggatggctgtttacttcacagtgggaaacatacatttcaatttgcttgatcaaaatccagtctggtgctctgaggagactgtgggttggggcgactggggagctagcagggacaggcactgggctgggatggctgggaaacggctcagcttcaaagtgtttgcagagattcctaattaaagaacaagtccacaaagaagggagttgagtcatgtttaggaattggaatgtggactgctgcaaatctccatgttgaaaattaatcccctttctggctctaagacaatgtactttggtattttcttagatgactgtggctttaccactattatccaatggggctctccagagttaaaatgcatgtcctggagcaaggatggcaaacacagaacaaatatctgctagctactaccccgcacctgtgacagacatcactaatcaatcaaagcacactttcccatgaaggctaaacagagcttcagaattatttttaaggcagcacttcagacagccactaacaatggaaccaaattgaaacataaaacaaaatctatttgcaatgcctgcccttgaagtcaggtatggtcttagaggacagatagatcttgcttaaagtaagttcactagaccaaagtttcaaaagtcattgtgatgctgtgttgggcccaataaaagactgggcgaacccatagtcaggaaactagcgagactccagttcagtccgtcctttcagttacatcttgtgttttctcttagttaagtgatcaaccaagcctctacttgaccagctcagtgatgcggaactcacgatcttacaaggaagcctatgactttttttggtcagctctgaactataggccatgaagtcagctggccctgggtcctggcttgtcctgttctgtgactctgagcaagccacatcatcttttgtctataaagtgtggggaagtcctgcctggttcagggaggtgtgatgtataactgaatgtatgttaaaaaaaaacttgcagaatgcaggccgggtgtggtggctcacacctgtaatcccagcactatgggaggccgaggcgggtggatcacaaggacaggagatcgagaccatcctggctaacacggtgaaatcccgtctctactgaaaatacaaaaaattagccaggcgtggtggtgggcacctgtagtcccagctactcaggagactgaggcaggagaatggcgtgaacccggaaggcagagcttgcagtgagctgagattgcatcactgcactccagcctgggccacagagcgagactccatctcaaaaaaaacaacaacaacaaaacaacttgcagaatgcttcacatgtggctggtgcacaaagcgtacagatcttcatgtctacattgtgcccagatctgccttactgaagcttccaacgctggttccttggggaccccagaatatgtctgcttcctcctccccttgacagcctggcagatgtttaaagacacatttgaacacagagtgtcacaccttttccggttccttcaacatttacagaaatcttctgtctaatgctcgctgcctctgtacttgctcttagcatgtgcatcaaactctcaggttatctctgaccatacctgggcagcaggactctcacctccctccttctctacactagacaccgattcattcattcactaattcattcacacgttcgttcacttgataaatacatcaccaagttcctgctaggtctcaggcacttcgctaggaacaaggaatacaatgatgaactcaataattgatacaactcccctgccctttgttgctgaattcgggcattgttctgcaaattcatagattccagaaatatttaattgtgtatgttaccctgcaagaagttgtagatgtagcagaaaataagggtaatgtggttcctgctttttgttcattcaacctcttaacaattatttattaatttgagcagacttgaagctggacaaacaaataagaaaccactggcataaatattatgaagacatgtaggtgctgtgggagactaggaaagggatttgccttggtctttttattttattagtgtggtatataaacacacacacacacacgcatatatatagcatatttatttatgtatttatttgtttgtttttgagatggagtcttgctttgtcatcaggctggagtgcagtggcacaatctcagctcaccacaacctccacttcctgggttccagcgattctcctgcctcagcctccccgagtagctgggatttcaagtgagcaccaccatgcacctgaaattttatattttatatttttatatttttagtagagatgggatttcaccatgttggtcaggctggtctccaacttccgacctcagatgatctgcccgcctcggcctcccaaagtgctgggaatacaggcatgagccaccacgcccggctgcatatgtatatttatatatagtatatgtatatatttgtatatagtatacatatttgtgtatatatacacatacacaccctagtacatatattttgtgcatatatagtatatatttttatatagtatatatatattatatatatgacatttcatatatatttatgaatatatttatatttatttgccattttaatcgtccttaagtacatattggttacatgtaatcagtggcattaattacattcacaacattatgtaactatcaccactatctgtttccaaaaccttttcatccccccaaacaaactgcccattaagcaataattcctcattccctcctcttccagcccctgggggcctctaatctactttctgtttctataaatttgcctattatggatagttcatataaatggaataatatgaaatgtatcctttgtgtctgcatctttcacctagcataatattttcaaggctcatccatgttgtggcaggtatcagagctgattaatgttttttatggctgaataaaatttcattgtatgggtataccacattttgttcattcatctgttgatagaccattgggttgtttccacctttggctattgtgaatagtgttactatgaacatgtacatgtgagtgtctgcttagtccctattttcaaatattttgggtatagatggtcttactaatacttaaattttaggtgcacagaattggattaagcacaatccttagttcatgttgtggaccaaatggtgtttccccctaattcatatgttgaacctctatcccccggtttgactgtaattggagatagggccttcaaggatgtaattaaggttaaatgaagtcataatgttgaagccctaatccaataggactggtgtctttagaaggagatgaagagacaccaggagctcaagcccacagaggaaaggccacgtgaagacacaagaagaagaagatagccatccctaagccaggaaaagtgccctcaccagaaaccaaccctcctgacaccttgatctgggactttcagcctctagaactgtgagaaaataaatttctgttgtttgaaccacccagtttttggtattctgttacggctgaataccataacagatgaggctgagcagatgaatacatttttatgatacacgttcatttttggcccatgtgtgatccaattttattattaattaattagcaattatttggttaccttgagttacggtagtagttcttttttttttctttcttttttttattttagagatgggattttgtcatgttgtccaggctggtatgaaactcctggactcaggtgatccacctgcctcggcctcccaaagtgctgggattacccgtgtgagccactgcacctggcccagttgtagttcttttcatgttattgatactaatccttgtacgtattacatcttcttctagctgtaacttgccttgttgagtatggtatgaggtgtaggcatcaagctgtacttcttcctagatgactacctaattgaaatagcactatttatttaaaaacaagataacaaaattgaaaacaaaacaaaaaaaacccttcccttttccattgtcgtgatatgtaattctattgtctatctgcgtatgaatctttttctggactctattagtctatttgtctatttttgcaccatttccgtaactgactgaattactctggcatcaaagtaagtcctgttatttgttagcattagtcacttctcctggatcttctttatcagaaatgtcctggctattctacaggctttactcctacatacaaatttagaatcactttagaagctgctgttaaaaatttagcactttggaattttgataggaattttattggatctgggcatcttcataatattaagactgttcctgttcatgaatgttgtatagctctaactccatcttgtgacttaaaaaattattaaaatttatccatgtaaaaaagtaaagaaggagcaagagaacgaaccagcaaactgcatgtatgaaggccctgaggcatgagtgggcagaattcactggaggcatggggagatggtgaatatacctgaagcgcaggatgaggagggatggggaacagatgagattgaagacgaaggcagtgctgtaaggatctggagagttctaagaacatcactgatatgaccagaatttcattctagaaggactactctgaggagagaagaatggactaggggagggaagaatagaaacaaggagacaagtaaggaaactactgctgttgcctgggagagagacagcttggaccagggtattgtcagtggtgttggagagaagtggacgg[132 bp omitted]aaccctgtctctactaaaaatacaaaattttagccaggcgtggtggcaggtgcctgtaatcccagctactcgggaagctgaggcagagaattgcttgaacctgggaggtggaggttgcagtgagccgagatcatgccactgcactccagcctgggcaatagagtgagaaaaaaaaaaaaaagcaaatttgggatcaacaggatatagtgactaaacagtcatgtgtgaggtagacaggtaggaggagagaatgattccttagtttctggtttgggtgactgagcaaacagggttaccagttgttagaagggaactcctttttctccactcctggttcacaggaaaagggattttcccctaagcacacatgacctttctccagcttttcacatactgactcttctgataggtaaacttgggaagaataaccgtgctgggctttgtccttcttcttttggtcaagtctgacttcagagggcaaagttctctgctcgtctaagacataagtctcacttgggcaggaccctccacgctgcaggctggcgctgcctgggacgaggtggatacactggccaggttcaggggttgagtaagaggaagccacttgtctaatagccccaaggccacattttccacctggcttctaggagaaacaaacttgatattttggcctttatctttactttttaattttatttcacaacttgttcaaaacctaggagaagtagcagggtaccacttggtagggatttctccacaaatccttaatatttggtgccctggggaagaaaaaaaatagatctggaattcaggaagccacatttgtacatggagtggtttcaggggcagcaagagcctgtggctgtgactctgggcatcacgctttaaccttggtaatttctagacacctggattagtccagatcggttctttatagttgtgtggttgtcttttaacagttctggtatggacaggcaggttgtgccttatgccaagtgatacattgactttgtgggtgactgtgcagaaaaatattgaggtctctgaacacctccccaataaatagcaccttattcctcactcaaggtttgaacaaattgaacaaacaaacaaacaaaaataaagataggggtgcacaaatctttcgctacggcatcaagccaggcagagggacctgactgtgctctgctacctggaccagggcaggcggtgccctgcagggatggagcaatacagtccctgcttcctgcggccgctcacttctgagaggatgaaggaacaaagaccagggggcagctttgaaaaagccttccatgaatctcttggacccgggaggtggaggtgacagtgagccgagatcgcgccactgctctccagcctgggcaagagagaaagactctgtctaaaaaaaaaaaaaaaaaaaaaagaggaaaagaaaaagctttctgcatgcaaaccaggaaaggggagaagacactcccttcaactccattctttgagatgggaacttaggaagaagagcattaagctggcttcctagaagtctaccaatgcacagagccctttgcaaaagctataaatccaacaatcagcatactgggtttccttggaggaatcctgagcaggcacactcttttctttcctttgcatcttcgcctggccctgtcctgctctgggaaggagctagacaggggccagttagggtcagtaggtgctggttgtagaaacgccttaggtgctgggaattccctgactactactatgccctgagctcatggggccactggctgtgaaacaggtcctctgttatttactttgaccttagggcccaagtaaataatttagcagtgtttctccccctctagcatgttcagctgtggcaattaactaaggttctgctgggattgccttgtttccagcattttctgacctctgaccccggtgaatttaattctgctcctttaataatttctgagggtgtagattctgtcgagtgagcagggtccatcctgcagaaatcaacttaaattctgaggctgcacactagacatattcaggaagaccgagccctgatttgttttgagtgcaagcaggagaggtgagccagacttgctctgcatgccgctgagggaacaggcatagccctgcctgagtgtatgggcttggggggtggtcttttcctgagtgggttgctgcctcggaggcttttggctctgggataggcccatttcctggattcctgcaggaaacagaatagctatgagattgcatggtgttccagtgggacatgcaaacccctcccccatcgttcattcattccttaagtcaacaacaacatatgttccaagcactgggcttggtcctggaggtggtaaagatgagaaatgcgtggtgttttaggagtcctttgtggccttttagggaaagatagatgtgtgcggtagatgagtgcagaaggattgagttcggctggagggtgaggtcacctcatagcttgggctcattgatgagcacctgagcctggagggaccaatcaagcctcagtctgcagaactttgcaacagaatcaggaatgacccaactttccagtggctagaaccataaggtatagttagaagcctgcggggtggcactttctttttttttttttttttttaaccgagtctcactctgtctcccaggctggagtgcagtggtgcaatctcggctcactgcagcctctgcctcccgggttcaagcgattctcctgtctcagcctcctgagtagctgggactacaggtgcatgctgccatgcctgactaatttttgtattttttagtagagacagggtttcaccatgttggccaggctggtcttaatctcctgacctcatgatctgcctgcctcggcttcccaaagtgctaggactgcaggtgtgagccactgcgcgcagccagggtgacgctttttaagtttgtggctaaatcgaggaggatgctggtctgcagagagagacagacagagaggagaaagagagagagagagaaagagagagagagagagagaggccaatgctcagagaaaagcagaagtaaaagggggaaagtgggtaattgctgcatttccagaggttttccaaatttatattccaaaccttatggaagccccgcaagctagcttgaacgagtgcctgacgcttgtaaacaaaagtgtttgtaaagtattatgacaggcagttgtgacaatactgaaacaattgtaacatggacaggagaggaggctgcaggagcacgaactggggacctttaacttcaggtgatggagtcaggccagcgaagaaaggcttcacaaaaaatggatattcaatcccagtcaggaaggaataataccagtgaccaacatcatttacctctcactctgtgacagacactcttacagatgctctgtgattatctgtaaatctgttttgtagcaacctaggaaatagggatgatgatgatcccatttttcagatgggaagactaaggctcggagaggcaaagttgcttgcctaaggtcattgcaacttggaagtggtggaactgagatttgcaccctggcccccagctttgttctgccactgggtttgactacctccctgccccctgtacccctctgcatggtttaccacaagggcaaggagcaggcagagatgcactggggctgatacttcgtatagacgaaacagcgtggacagagaaagatagagaggaggaggaggagaggacagtgagcctgggcaggatctgctacatgatttgtaggacccagtgcaaaatgagagtgtttcaagacagcaactgcagggcattaaaccctgtgtggacctttctggatcctgggccttgggggcctgtgcaggtcccacaccccagaagacagccaggagtttgggcaagcacacaccattgcttcctgccagggctcaagagggaaccctgtgactctggcaggggcagcgggggaccacttgataattccgcaatgcagccagcacagtctccttgtggtggggattgtggtcccagatgagggcagggtgggcctttttttttgcaaagccagagggtgtggattcagacctgtaggggatgaggaaccagtaaaagattctgagaaaccagtgatgccgtctaagattgcgtttccacatagcagaccctactggaagcactaaaaagaggggctggggggtggcagtcattgttcctgcaggtaattccaacaggagttttcttttcttttcttttcttttgagacagtctcctctgtcacccaggctggagtgcaacggcatgatctcagctcactgcaacctccgcctcccaagttcaagtgattcgcctgcctcagcctcccaaagtgctgggattataggtgtgagccaccgcgcccagccaggggttttcttaacacaatctgtttgggttctcttgcccatttaagaggatctggccaagaaagttcagaagttgcagtgagaaaatactcacagaggggatgttgaatccattaacactgtattttttttttaaacctctcagctggaggaaaacatttaaatagaagtcattagcgagcatgtttctgaagccaacagtgcctaataagtcaaaattgctttccctaaaaaatgaaacctattgaaggttttcaacccctctttttgaagtgctcaattagggtgaaaaaaagtccatagctctccctggcttgaaattgttgaaaggtaggagtgctttctggttaggcattgtccaaccacagggatacaaatcagccctttaagataatttatatcttggagaggagttcggaaatgggtccgcttggagctaaaagcgtcgtaaataagctgggctgggaggctgtgccggccacactggggagttacagagtggtctcccagctgctgcccaccagaggaacagggactggcctgcttccccctgagccacgcaggctgatagatgtcaggacccatggctggccagtccatatccattgtcctcgtaggagactggacctcagagtggggcaggacttcccacagtcctgcagcaaaaggcagtggcagaaccagtcttggggcctcgcctcctggctgacccaggtgctaaatgatccctcactaggcactgggactgtcagctccctgaggaccaggagttgagttaaggggggtcagaccagcaccaggacccaaagacagtctagtaagtacaaactatcagtgtcataatgaaaacgaacacacaagaaagcatttgtgtgtgtgtatgtgtgtgcaggtacagagatgtatacctgtggatacctctatatacatgcctgtgctcgtgcgtccatgtggatgtgttgcagcacatatgtgtgtgttgtttatgtgtgtatcttttatatgcccatggatatgtatgtgtatttacactcatgcatgtatatgtgtgtgtgcttgcatatgtgtgtctgggattggattgggggcaccttattcagtctggaggagtcagagaatttaattcaggaggcccagcgcggtggcccaggccaggcgcggtggctcacgcctgtaatcccaacagtttgggaggctgaggtgggcggatcacctgaggtcaggagttcgagaccagcctggccaacatggtgaaaccccttatctactaaaaataccaaaaattagctgggcatggtggtgggcgcctgtaatcccaactacttgggagggtgaggtgggggaatcatccaaactgaaaggcggaggtcgctgtgagccgagatgcactccagcctggatgatggaacaggactccatctcaaaaaaaaaaaaaaaagaatttaatccatgggctgagggtaaagtcttgggcaaggctggaaaaacgtggatagcgagtttggctggatcaggtgtagactggttatggagtctgtatcttaccttgtagggccttgaaggctcctgagaagggggtgacttgaccaaagctgcatcttagatactataaatgcctgcatataagatgaaattattttcctccatattttccctcaggaaagagtccttccaaaatttgtcatgtaacaaacagggcatcgcctaaattatttcaaaacgcaatactgtttggagaaagtcttggtagcttgaaaccccgacagtctgtcagtaaaaataaaaggagacaaataaattgaacacagatggagtagttaattattcctgagagcctgaccccatgatcgttgcatgttcttgtagcaaccctttcaagggtaattttaagcaagcgatgaagagaattgtttatgctgagggcgaggtcctgaagatgggttcgaaggtgcttgtggtttgggtgttgaggagtcggatctgaccttacgaaaggtcaaggatggctctgaatggacaccgaggatgagccctggggggactggggctgcggctgggccccggagagggggcccagggtccaggaaacagctaagcttgatctgggataagggaggggcagagggtgaggcacatcccgcagggtaaaaggtgtctctgaagtgccgcatccatgcagagccagctccgtctgcctgcaaattgaggtgacagagacttagtgactcctagtgcttgctgtcacttcccatttcgctgctcctcccagcttggtgggaactgggtggaggctgtcagagagcctgatgtacacctgagccctgtcagccctcaggtgtgaggaaccaggaggggtgctggcgccgggccccctgtccagggctgcgctagctgggagcagggagaggaaggcgggcaggtgctgaaactgcctctgcacctggggatcctgaaggggagcaggtggctccagctctttgttctaagctcagcctgggattctgagggtcaaactcatacataaaccaaaagaccctgctccacgctccccactactgttcgccatgacaacagcaggcccgggcaatagtcacgatgcaccatccccctctcctccatatcagggcttccacccacgggtgaagaatgcccagcggtctcagcatcgagctccaggagaaggccaaacgcattggggtttcctcgcacacctccagcctcctgccccgactcgtgctcccaccccgggaacttctccgcttcccctgagcattctaggtatgtctgctgttctagaaccaggcaaatcacaccatcccgtcctcatccttgaatcttctccatccactccatccacttctttgaagtgttctcctctgatgcttctcctattctttgaaaatgcatcccttgttcttctgagtggcccacactgatgaaagcaggatgggcggagcctttctgaatgatacagacaccctctgtgtctccaggtcctctgcaggctcccagcctttgaccacctcctctgattctccaccccagccggtgtccaaatctcacacctcccagacacgggaacatagtcttgcctcaacacagccctggacagagatggaggggatggacagagaagcaagctattgggcaccattcatcaaacatgtccttactgagccctgccctgtgcagatgctgtctaggttctggagaagcagcattcatcaaccctggcatggctccgtgccttctaacacgtccagtgttagaagcagacgttaacccaataagtacccacatgaaaatataactgcaaattaggacaaaatctctgaaggaaaagaaataagtaaaatcatgcctggaaggtgtgagtcacaaggcaaagacccagcaggccttcttttctctaacttcatgatctgcatttttctgatgaggaaactgaggctctgaggggtgagaagacttggggaacatgtgataatgtgatgcacaagtaccagagtcagcctggtctgcggagagtcttgatcttctgcatttctggtgtgtgtgtgtgtgtgtgtgtgtgtgtgtgtgtgtgtgtatgtgtttctgagacagagttttactcttcttgcccaggctggagtgcagtggcatgatctcggctcaccgcaaactctgcctcccgggttcaagcaattctcctgcctcagcctcctgagtagctgggagtacaggcatgcaccaccacgcccagctaattttttgtatttttagtagagatggggtttcaccatgttggccaggctggtcttgaactcctgacctcaggtgatctgcccgtcttggcctcccaaagttctgggattacaggaattctgtttcttctcgacaccttatccctcggttcccgctggggagaacacatgagtggaaacaggacgaaataggcaaaacccagaggagctctttatttattcaagttacgttgccctcccttcctattcatgtcttgtgatagaatggttttctcctgacagcgagttcacagacctaggggatctggcactggggtggatgcagggttgggtctgggaatttttttctctccctcttcttctccctagaggatcccttgatccagctcaaggacctcaaagagaatagcagctcctcctcctccctccgtcatcccctgggctcacgggattgacattggccatgccctgtgtgagtagtgactcagcagtgccctttccatggaatttccttcatcatctgagagctggagaacaagcatgtgtgtgccggccatgagatgactgtacaggggaaggaggccaaggcttccccgagaggagctgcagctggcctggtgtgctccatgggtggggtggtggggaatggacaggtgggtggatgtgggtgactcgttagagcccatggggatggggtccttcaaaaccaagtagacctgagctccaaccaactttccctttctagctgtatgatcttgactgaagtcacttaaactcctgagccccagttttctcatctgcaaaatgaggctaaaacaggacacattgaacaaggttgtgaggaagattatataaaatggcatgcaaaatgcttagcataaggtgcatcaatcctactgtcctcagctgggggcagatgacctggacaggtgatgggggggaggtttccacatggaggggcttcaaggaggagcacggggagaggagggagagattgaggtggaagtggctggacagaggaggtgactgatggagaaaatttgttcgaaaagactcaaacagtgtaagcatgagtttccaagtgttccgctcacttgatcggcagacatccatcaggaattcgttgatcccatgctggttatggtgggctcatagtttggagggagtaaaccacataaaaacaccta[187 bp omitted]gaggcaggagaatggcatgaacccggggggtggagcttgcagtgagccgagatcccaccactgcactccagcctgggcgacagagggagactctgtctcaaaaaacaaacaaacaaacaaacaaaaaaacaaaccacaaacaaaacaaacaaacaaacaaaaaacccaaacaaacagacaaacaaaaaaaaagccacctaagtgagcaggattgttttcaccagtacaaatagactttatttttctgacatatgttcagagataaagggtcctccattggcagagaagctcaggtgtgtcaccaagggcctgggatactgttttatttgtgctttttccccttagagggttggcttgtcacctcatggtcccgagatgacacagaaaagagccagcagtacagctagttttatgtgctccaacagaaagccctaaaaaggagaggtcgaggaaagggattagaaagaactaaaagcgtttcactttcttaaaaatatttccaaacaaagaattaatttgccctggaaaggatgcttacaaagcatttattgcacccattgacatcagtgtgttgttctctcttgagctgaaatacggcagggggcggctggctgtttaagtggacaaatctgcccatatggggtcaaagagcagagctggaagtagaggctggggagaaaccactctgcttctccagtgaccctttcctgtgccactgggatgaagaggggcacagggaatgagggagcggcccctcacccagaccaggtatgccttcgggaatctgtcagccgtgcgttcggaacttgacatcatgttttctccagaatttcatttcagccaccagccatctgctagccccagttctgttagaatttcttccacagcagcatcccctcctccctgcctttccttaggacaccaaccagctctctctcactggaggttggccaataggccctatgccccaagaggtggcagcagtagtcacatggtgccaccagcttcaaaatctcctttagtttgtgatgtctggttgtttgaaatgagcccactggacactccacgtggttagtacgtctcaagactattaaggtcacaaaaagcaaggcaggactgagaaaccatcacggaccagaagagagtggggagacatgacatcgcaacgcggtgtggtaccctggattggatcctagagcagaacgaggccatcagtgaaaaaaccagtggaacttaagtaaagtctggagtttagttaatagctatgtgtcaatgtcaacccatgtctttgttttgacaaaagtactacagtaggctgggcacggtagatcatgcctgcaatcccagcactttgggaggccgaggtgggcagatcacttgaggccaggagttcaagaccagcctggccaacgtggtgaaacctcgtttctgctaaaaagtcgaaacttagctgagcgtggtggtacaagcctgtagtcccagctatttgggaggctgaggtacaagaatcgcttgaacttgggaggtggaggttgcagtgagccgagatcacaccactgcactccagcctgggtgatagagcaagactctgtttccgaaaaagtacaattgtaataaaagaggttaacaacggggaaaaccagtgaagggtacatgagccatctcggttctctttgcaacatgtctgtaaatgtaaaattcttccaaaatgaaaagtttattaaagtggacccacctcctctcttatcaatgctatcagcttgaggtgtccagtagcttaatgtagaagatgacttgcaagttcaagacctttgatgagtgacttatcggaaaattcataaaaatggggtaaagtcgaggtgctttctctcctaagcacctgtgtctactggctggtgcaccccaggtaggcaggaggagcaaagcagggaccacttttgccatcctcttgcaccagggctttcttgctgccccagtacccgtgcaccttccagtggatggctgatcccacaggctctgcctctaaccccaccaacttctgcaatctgtggtccctcaatgctttctgtccctcagacttgcccagctgctgcccctgtgccagtagagggggtgatgtggggtcaggacgttataaacccaaatctaaccacccttattccagcacctgctatatcacaccccacaccagaactggttagagctggaagaatcatcatagctatcatttcttgaatataaaccctatgccagaaactcttcactagaaataaaatactttccccattttgcagattaaaaaactacatctgggaaaatgatgtcattttcccaaactaaaaaagcacgactggccccaaatcactctcgtcttattcccctgccttccttaaagaaaggctcttcaggagcaactagaaaacctgcccattttacagaagggcaaaacaggactcagagaggtaaggtttgcataagaccacatagcctattcacctctagccagaaaaggaactcaggcttcctcactgtgctctctttgccacctgtgaattactgaagctttctgggtaccaatggcccatgcctaggaagtctagttgcctctagaccagaccagtgatccgggaggctcctcccttcccagtcaggtacagattacctattccacttctccctgccgccctcccacccctgacacccctgtgtctgcaggcacagctcagcagggggtacaattaccatctgtgtcactggcatctttacagaggcatatttaagtcgctgcagcactcacaggagaaagcaagtaaatacacagcccagcaaagtgccgaacccagcctcagatctgcctgcatggagcaggcatcgaatacttctcagcactatgcggggaaaaagcaaagcaaagaaagaagaaactgcatctccactttggagatgttgccaaagtttctctccatctctgaatgatgctttttcagatgaggcagtgtccagaggagcaaaaggcaaccttcacaggtgagacagtcaagcccgtgtcaccttgtgggccaacatcttggtggagcatacagccaagctgcatgggtaaaggagattactgaggtgcctctgggtgtcgatggagcacctgcttcctcatcccaccacggtccctggcaggggcacgcggtgcagtgagccatccgcactcatcctctgggtctccctggtggccagtagaatccaatggactggatacagggatcagtctgtgaccagagcaaggggaagcagcctcttgaattcttgggaagaaacatgacgactgtgggaagccttcttgggtttattaaaaatatgtcatgctaggcacatcatgtttttaaaaacacaattatttatttaataaatatttagtaagtatgcctatgtaccaagaattcaacttggcaccaaggataaagttctgaatgtgatagtaagttcccgggccatattagagcttaaattctagcagtgggggctgtgagggttgggaaggagacaacagatcataaaccaacaaacacacaaagagatgatagggcaatgttccatgaagactggaaactggacagtgaggtggatgctttagccagaatgacagggcaggctctggggcggtggcatgtggaggaagagaacgtatcacaagcttggtggctcagtagaacattgcacatgtggcatttctggattttagcaaagctttggggaaaaccccttcttgtaatatttactaaaatgtgttatgtgcgtattccatggcaaatgttgttttgcttcacactcaacagacattttatttggtccttacaagcactcccataaaggaggcattttctctgatttgcagatgacagtgttgaggcccagagagattgtgacttggtcaaggcgagagagatatgagccccacgcccggccctcacccccacgtgggcttgtcacccccatgcctatgactagtcaggctgcctttgtcaacatgacatagaagtgtaggatggctgatgactcataactggttgaatgaccatttccacggctgatgatgactagatgaccaccgtgaagggagctcatcatagtggtggctcaagcgtggtccacagccctgccttgtccactggtgccagtggcctgaatgggggttcagtggctagtcggggttcagtggccagtcacagttcagcctcctctccaaccacctctgaccttgcaccagctagtgcaaagtcactggcagtttctgtgacagcctgtgtgtttcacacttccctgcctttgcaaaggatgccccccacccttgtctggaatggcccctgcacctggtgacccagatgatgcccacttctcctctaaaagccagcttacatgtcacctcctccaggaagccttccctgaattcctccacactgaggttgcgagtcatttaggttccaatgctcgctctatctatctctctatctatctctctatctatctatctatctatctatcatcacagctagttgccatcccagcagccatctactaacatagaaacaattttgatcaagtggggatgcgctctgagatgactggcctatccccagaggatgaattataattagccaaacccattcctccttggccaggtattggctgaggggtactcacagggttcacttctggccaatgggccttgccagaaggaggatctggcaaaagtttccttatccagtgaaaaaagaaacttgtgggaagaagtgtccctttctttcttgccttagggtattgtcatttggggaagtcacgaacagcgcttcagttgtcattttgcagtcatgagggggcggtccagggagcacagagaggccaccacagattctgacatcattgagtgactgaatcacccaaccttggaactgcctacctccaggcgtcttgctgtctgagatcataaaccctttgcttgacaccacttttactttgctatttgttacttgaggctgcaggcatcctgactgatacagcagagctctctctttgtggtatgttttcactttggtctgttttctcgtccagttcttcacactggaaactcctgcaggggaccggttcttttttatcaaagactctccagtgttcaacacaaaatctaacacacaatgggtgccttgcttagtaaatacatgaaaagatgggtggctggaaggaaggaagaataagctatcagatgacgtgaagtaaggaggtgatgtaaatacctaggatccaatagttgaggtctgcaaagagaggagcggatgactcaagagcgaaacacagagagatgggattgatgtgacatcagacctgtctgattcttagtcccagactcctggggggtggggggatacatttctcagcagtaaatggacatatgatggcagcattgtgggaccaattgcttttgggacagggatggtatacaagttactatgaaacagtcccaactatgtggagagaagagctgagggacaaggagttggactgtgattaggagtgactctgttatcagtcctccctatcacttcttactggtcaccatcactagaaagaagggctttgtcctgacactgaaatactcctggccgtgttgactcccaagcccttctcaattacttcctgggttctttcatgcgcctccttcctcaacctccctccctagagtcagtagttgactctagcttctacccacacaggggctgtatggtgttcccctggtggggtgctttgcagggcaggtgcagcgtgacatcgagcacagatggcatggatacccagcagccttttgctttttcttcttgagtcacctccttccctggtggcagccacatcaactcttctgcttgattattctgtaccaagtgtctgctgctgcagatggacacttctgaatagcagctgccgggaaatgtctggcttcccagaggagctgggcttgaattcccctgggctcaactggctgtgagccttttgtgatcacccacctgaaagcctcatctgtcaaatgggcacatgaaggcatctatagacttatcagttttaagtgggacaatgggtacgagagggccagggctggcttcatgggtatgagatctgtgaaaggctctgaattctgtgctcagaagggacccgtactggtttaatatcctccttttatctctcgaaattcttgatagtgttttaaaagggggctccatttttattttaggcccttcaaattatgtagctggtcatggagagggctttgcaaaccaaacagcattgcgagactgcacagtgggttgctgttataaatcgtaacgacacacacattcacattctgtaaaggatatatatgtgaagggggcttttctgcaaggttgggactctgaggcagcacagaattcgtctctcacttactgtatcctcttcctgggcttaaggatattaaatccaggtgccccaagaccttcagagcattctgccttcatgcggatggtgcagactctgttctaattctgcacttggccagacatagctatgcaaactgcagcgagtctcttcccgctctgggcgccacctgactgacccgcgtaaggagggactgtgactggtccccaggcaaacgctttccctgccacctgcacctgttgcaagccagctcctcggagccaggccaagcagctctgcccctagcgggagtcggaggcatgaaactcccttttaggaagacggagtaagaggcaccaccacctgctcctgctgcctctgctgtcctcagcttctgggagcatcttagcagccagctccgggtgaggacagggtccaccggtgcacatggcagagcagggcagatgctgtgacttggcggctttgggggaacagggtggggctcctccctgggaaaaatctttaggtttggatccagcctttatttaaagagggggattgtgtatagacttgtgtgactgttcagcctctttccacctcggtgcgtgtgtgtgtgtgtgtgtgtgtgtgtgtgtgtgtgtgtgagagagagagagagagagagagcctgtgggtcaatgcccagtatgcccctctgagagtgtgtctgttagtagacaccagtgtgtgacattgcttctgtgggcaactatgtcaaggcgtgggtttgtcactgtgtgcggtgtggagcagtatgataagccggcggccgacccccgagtgtgtagacgcgggagctggtgtcagggtatttgtagggctgcaattctgtgtaggtctgtctcagattgtgtgagagtgtctgtgttccagcaggtgcttgtttctgagtgtgaatgtgtgtgaagctgtgaccgtctgtctctagctctgcatgggacggtgatccggtgtgtgtgtgtgtgtgtgtgtgtgtgcgtgcgtgtgtggtgtgtgtgtgtattagagtgcactctaaactgtgtggctgtgtgtgtacgtgtgcgtgcctgtcacagtggcccagtctgcttctgggtgagtggggcagagcccagagagtgtgtgtgtgagtgtgggtgtcggtgtctctgggaagcagtgattcgggatgtgtgtgtcaggcagtgtgcggctgtcgctgtgagtctgcatgggagagtggcggcgtgctctcctctgcgcggcagtgccccgtgtgtttgtgggtctgtgtctgggtgtgagcgtcatggtgcgtgtgttagagcccgtggggccccggtgaaaggctgtggctctgggtgactggtgtgtgtgtgtgtgtgtgtgtgtatcagagtgggtggcggcgtctctgctcggcagtggcgcgtgtggcccgccccgcgcgcgtgttctcgcgggccggggcagggcgtgggccccctccggcggagccgcgacccctcccccgggcggcgggaggtgcgcaccggcgcctctaggacccggcggcggccggccgctgtccccgggccgcgcgagtgagcatgtgcagagcccggcgcccgctcgcccgcccgctgcccgccccggctccgcgcccgcccgcccgccccgccgttcagcccggacgccagcagccccggggagccaggcggcggcgccctgtgcccgggcgcgtgggtccgcttgccgcgggcggccggagacgtgcgggcgccggggcttctgggctccgggcactgcggggggctgcgggctcggcgcccggggaaggcgggccatgggcgcgggtgcgggcgccccagccggccgcgatcgcggggtgagtcctgtctctcggcgctccagccggacccccgcgcgggctgcgagcagggtgttccccttgccgcgggcaaacaagtttgtgcagacgcggttgggagcgcggcggggctgcacctgctccggctgcagggcgggcttgccgggggcaccttcccgggggcccggggcggctcggccggggcaggggagagtgagcgggtgcgtgcaggggttgtgggggggcgggggcggcgctcggcgcggccgggatggggtgggggtgcgcgaggcgccgcacgagccgcgtccccctccggagtcctgagagcccgtccgtcacccgggagggcgctgcggttggtcccggggagggggcgagggcagggtgtggggtgcgcacagcttccctcctaggcggcgacgtttacccagaagcagctccctctcgttccgctaccaagagaggcttccggtcagcggagggtttgctccgtctcttggtgaacttgaacagaggcagaggcaaaagcaaaacgtatgtattttgtccagaaaattacctagtgtagagctttgcgtcttcgtaggtgtggacggagactcacgactgaaggttgctaaattgcgtttttcttggctactcaggagcgtacgtacctggctgggtcccctgcctccgggtaacctcgctggtggttttcctgagcatttgtgcgcctgggatgatgcctgctctgctgatcgggaatgcgggtggggaaggggaccgctcttccttccgctgagcagtgggaaggctcatataggagttctagcctcatagccctgcactgggatccagctgctccccacactggccctgcccctgcagctcccaagatggacagatgcaggactccgctgtacttttctaacatgagatacccgcatccctcttgttgctggaacagcatgcttaggtttatggaggcacttggtttatcccactttggcatcaggagtgggggcctttcttttttcctctgatttgcctaggttgtcaggcacagaaagtgagggtggtggggagtgaaagttacaggagatataaagctggcttgccctgcgctgtttgcaatcacccactcctggtggctgcaggtgctggggagagagctaggggaggtttccttgggctatgggagaatgaggtttgtctctctcaatcatgcccccacccccacacacttagattggccctcaggagatcctccgggaaggggcctcaaccggctgccagagctcagggtttctaggaggaagagcaggagctctcccaggcatgggatctgaaggaggcttggcggtggttgggctggtggctgagcctgactgcctcatcttctccgccagaaggctctcacctgtggctgcatcctccaggcctcagcagggccatttccacagctcctctgtaaaaatgccttcttctggggtgaggggatccctctcttcagtgggcattgtgccctatggggtactgccctgtggcctgtggcatgtctggttggaagtgaagagaagctgggataaggcagaaggccagactcctgtctcttcctcctgtcttcctaaccgagcagaagtggatattcagtgccactagtgggtctgctgctgaagcttgagcctccaacctgatcagtttggccagagcactggggaatgagtcacagagctggttccttatggcatcagcctgagcaggcgactcagagcctctgaatccagagcctccaggccctgatggaacccctccgagcagggcctctagggaagtggtgtttctcattatagaagctccaagcttgtactcccatccagctcagacccccatcagccttggtgagaccagctccctgactctttctctggaggtacaatgaggtcaaggccaaggactttggggcagctcagtgtttagaccttcagggccttaggccttaaaatgcaggtgataatcatatacactagcagggccagagctgggccctaacatccagggctgctcatctggggaatgagggaatgaatgtggctttccgctcaccaccttctccctgggcctcctggtctggccttcacattcttcctttaatctctcctcatcatggctttgacaatcgtgctgacatacggcctgaaaaattatcggaagtgtgccacttggagaatgtggtcagggaggaactctgcatatgccctgcctcctggtgtggatgtgagaagtggatggaagaatgggctggattcatttcatcagctatgaaatacagtgcacctgctggtagctgttaaggcccctccccttcacttcgcttcccttcctttgctgccggaagcccctggagatgtgagctcccttctagagagtggctcccttgacatgagggggtcgagagtattctgaggacaaggatgtgcagcaggctgtcttggcctctctcccatagcccgagtgcccagtggcagcatcaagttgggcaggtctgactttggttgggcactccactcacttgtccacctgtatccaactcactccgtggggtttcaacacctgtttaccttccagattctgggatgggcttgagacgacccttaagctttcagcaccaggtggaagaaacacatgaataagtaaacaaaataagattctataaaagagatagcccaggccaggcgtggtggctcacacctgtaattctggtgttttggaagccaaggtgggcagatcacctgagtccaggagtttgagaccagcctggcaaacatggcaaaaccccatctctactaaaaatacaaaaattagctgggcatggtggtgtgtgcctgtaatcccagctactagggaggctgaggcaggaaaatcgcttgaacccaggaggcggaggttgcggtgagccaagatcatgccactacattctagcttgggcgacagagcgagactccttcttgaaaaataaataaaaataaaagagataacccagagataggctggaaaaggttgcgactggctgtttcaaaagtgagaaaggctccaaatcaggcaccaggaaaggaaaaatgccggccccggcgctggtgctgtgtctttctgtgtggacccagcctccagcatggtgcttggaaggatctctgtccttggtattgcacacatgaagaccatgtgatatggctggtgatgatatgctctggaatcagagcgacttagcaatagccgtttgtatttgttcaagttaattggccttctctgtctcagattctgcatctgtatgatggggacgataatgattttggcctcacagatttgtgggaagatcactcattcatttgttcatctgatcattcatccaatgcacttgacagttggtgaaagtacctggaactctaatatggtatgttaaattttttatttatatgaaccccaacagtgggttaattgaagaggtttccctcctttgtgtggaatggagttttgacctattatgttttatacccttttagcaacatattaaaattttgaatcttttttcaagctctgaagttcaaactctcaagagatttgcctcatcaaagacagggatcccaccccatttgcatttcccagaccttgttcccccaaagggcccaacagatttttgtttagtgggtctcttgctttttctcagtctccaagacccagagttgttaggcctgtcagtaatggcagcatggccctgagcatcgaaggatgtccagtccagcaggcacttattttcaggggcattccctgtgccccacccagaggtgggcagaggcactgactgtgcctttgacaggcctacaggctggaaggagaggtagggacattagcagggaaccctgactcaagaccacacactacccaggcacagtttgtagcagcagccttgctgcttagtgcctagcactgaggagtggttctgctccagagatcagggaggcttcatggaagaggaggcatgggagctgaaccttgatggcctgaagcatttcagagccgtgagatggggcacaagcatccctggctggtggaagggcatgcgtgagggtgcttgacgcctctctcgctaaccaggtgatgctctggtgggatacagggcttgcttgtcaatccctgggaagccattacaggctgtggcatcattagctcctcatattagaaagatcactttcttagatggaaaggggacagtcttttggagaggggatggggtacagaagccaggcgctatgcctgagcggggtaggggcaggggcaaggggaaagtcacaggaggggaatccaggagctgtgagcccagctggaggctcctgcatgtactctgcccgggtcctgaagctgagaccccctggctgccagtcactgaggctgaggcttcgagcttctaggacccagatgcccatcaccttgtctagagagcaacgttctgggccctattcttgtcgctggggctcctgccctgcaaagagcaggcagctccaagtcccaagaggtttgcagcccttgctgcagctgccacagtagctgagatccttctggggatgtctggtgtcattttcccttcagctgcctctgcctgttctctctgaccgggggtcacggggaggttgagtcatctgactgaaccccagtggccactggctgcacctgggccagctccgagttctatcttgcagcccccagccccagggactgcctcctctcctctccctgctgccacccctcagtctctggacccctagcctggctgagaagtggccacctgaccagcccaagccacccatcattcaggctgggcagttgctgctccctcggtcccagatggcaacaaagtaatagacaaaagctcaggttgtctgaatatccaggtgctctgggctcctgctccctccctgagacttccagaagcccatttgttctgttactctcttctcatgcttgacagggaactcagaatctccctccccaggccctgctcttctgtagggtgaccccaggacagggcagtgggtgtgcacctttgtccagccctggcgtgccccctctacccccaataaggccaagccccaggcagggatagaacccctctagcctccccctgaagcactctgcagggttccaagatgggaggtgcccacaggaagcacaccttggggaaaaattctccagactttcagaggggaggggccccaggctgcctcccagtcccagtgggctggggcgggaacactcacggacaaggcactgtctggaaggcttggctggggagacaccatgtgtggcatcatctctaggagctttggcccggcatgacttcaaaaaggtgctgacagaggcgcactaaactcctctcaagaataaatcttgcctcgtgtgaaaccggagctgggatggggagagaaataggaagcttcgtgggcataatgtaggccctgggagcaggtggcctggtctgagtgctggccctgagctgtctggctttaggcagtgtgcatcacctggctgagcttcagagacctcagtgctcaaatggggtatgcggggcatttgcttggtgggttgtctggaggaaatgagatggtgcaggtaaagtgcacagcccagttcaacctattcacactgcaaatgcttcataaatggtggcattgacaaagcaattgctaacagcagtctcagcatggggatcagctgtgagcaagagtgggatcctgggtgcactccagggactgtgggggctcagagctggggagaggcctcttgagtctgacttcaccagtggcacagctactacaggcccgtcctccggcttttccttgcttgcctcttttgcattcataaccaatccatgccacagtctgtagggaacagagtagcggaggtttcatgtccactccctaattcgatcccataaagcatatttacccccatttaatggacaatgagcctgaggccctgccctgtgcaatgctttgctcgaggtaggtttactgtcatggacagcctgctggctttcggatgtagtgggtatagctgatggcctcccaggccctatgcagatgagcagtggctagcattctgcccccgaccccaggtgttggccggttgtgctgtctgacttacctcgtggcttggctgtgagcccttgtgtagatgctccaagtttcccagcccacccccaggtctcttttgggttcattcacttagcaaacatttaccatcactgccctgctagctgtgtgctgggatctgggaacatggagataaacgaggtgtggtctgtgccctggaggggggctgccagccttgaggagagacagtgtgatgtgatgttggctataaag[131 bp omitted]cctccgcctcccaggtttaagcatttctcctgcctc[134 bp omitted]gcctcccaaggtgctgggattacaggcatgagccactatgcccagtcttttgtttctccctaccagtctacccgcaatgagttttccaggctaggaatctgctttgtgattttaaaagttgggagtgcagcctgcttcatagaagacctgggccatggaaatctggcctgcacgtggctgtctgttgtgtccacaccagcacccacctccccagaccagggaaaccccttctgggaagggggagcgccagaaaatactttggaggaccttgggaccctgtgtgagatgtattgaatcctgattcatcagctctgaccactcctcaccccagccctacttgtattgtatatccaaatcctatctagaaagtctatacggaattcaccagtatactctgccttcaaaattccgaattgttgaactcctgcctgcctttctgctccatctcatcagaaaacttttcacagcaggagtgctaccctcttcccttcagttatacaggattaatgtgctccctagtttgtaaccggagcccctttgtgagcagacctggagacccctcctcatagaattacatcacagaaaggatgacataaagctcagcccaggcactcttgttaactccatgcgtctgaaagccctcagctccgttaagctgtgttcctggaccgcctgggggcctgtgcctatgcactgctccatctctcccatgtttcaggcttcatccatggctctgggtaagtggaatttgagatttcactgccctgactccataggagcaggtttctgatgtcaggatttgcgtatcaatttatctgtggtctcgttcatttttaagatgtattcataaacaatgatcactgagcatccacactcccaggcctcatgctggggctggggttaggaaaatgaatgaggcatggcctctacccctaaggagattacagactttggagggtaaccgacaagtagatggacagttctgatcaaccccgggatggtgagtgctgggctgagggtcagcaggggctgtggaaagactgaggaatcttcagggaagctttctctgaggaacaatatctggcctgagccttagaggatacacagggatttgataagtgaagaggaaggaaacagcataaataaagggtagcttgtgcaaaggcaccgaggcagatgtgctgtggttccggttcccggtggctctgctggaatgtggagggtgtgtgtgtgtgtgtgtgcgtgtgtgtgcgtgcatgcatgcgtgtgcatgtgagatggggaagccaaaggaagagacctggcaagagatgaggctggatgggctggatcatgaaggggcccttgtgtgtcatgctaaggagcttagagtttatccagtaaccacagggggctattgaacggggttttaagcagggacgcgccatgatcagatgtgcatgttaggaggatcaccctggcagccttgtggaagatggattggagggtccaaagctggaggcagagagatcagtcaggatttcttgggattttctctgtggttttacaaatctgatgaggttgtctggggtgggcctggcagacatatcagcctagaaaatagaagctctggagaaccgtctgcaatttcccagcccagagtttaattccaccttcatttgctgattactgagtctgctacctccgccccagcctaaaggaccagccgacccagatttccagatctctgctctccccgagggcctcggaacctggcggccctcgccatttactcagagagggtcatgcctatctggggtctttgtccgaagcctccaagctttctgggggcctggaatgccagcccaaacattgtccttcctctcacacccgctgtctgtccctggtgcacagagtagccattgagtggctgcacaggcctggcggggggcccggaccaagttagttacgggcagtggcttagtcacgcttctaggggcctttttttctgggataagcctgtccttgtgctaagggctttgctcacgcaacagcccaggtcgtggcagctgcaaaaccctctcccaaccccaacagcacacttcagaggtgccgccaatgagaaccgaaacccagagtgacagctgagtcctggggagtggagagacccatggaaggcagatcagagagccttctgccttctcttctctgggtgctcagcctctgtttgcaggtgcacggctcaggcgctaccctggtcctttgattctggcctctggagtccaggaggcctgggaaggctacacaagcccctccctcccctgggccccatcctgtgtgaaagccaacgaccagcctgtgcagaagctccttccaacccaggctcacagttccagtgcacccctgggagtcagctgattgcatgcatatatcaagcatctgcaacatagtcctgcctgggctaggtacatttatatgtggtagtgtctcattgcaggctgggccatgcagtcattgagagtccaggctccgaacacagactcttcaaaaccttggctctcctgtttaccagctgtgtggcttgggaaaaactagctaatatgccttcttttgccagtttcctcatctgtgtaacagggatatgatatctctaggttgttggattggtttcagggttaagtgagataatatgtaaagtgtttagctgagtgcttgacacacaggaagggctgaggaagagcccctgctgctgttcctcctcccccttattgatattgctgtcatcactgactcctcattattcctcaaggggagagctgttgtccccattttacagatggggaagctgaggcccagcaaggttaagcaacctacccagtgtcacacagctggccagtaacaaagctgggatttaaacctggctttgtccagtgctcctgcaacacagctggtccttggataaagcaagcacagggtgaggggtgtcccagcctgggagtgccaggtagtggacccgcctattacatctcggtgctctttctccaccttccagatttctgcgccaggagatgaggggcggtagagccctggaatggagatgtccttgacgcctgggcagaggctgcagctgcaggaccctgtggccactggagataagtaatggtgccatttgaacacctactggaaacggggcaggaacagtgagtgaccccaggcgagcacaggcaggtgccaggagccaggatgcaaggatgacgcctccggaggccctggcctcactcccacctgggcgctaggagccatcccggggctccagccaggagccctgctgcccaggggcatggccaaacctttcttccgactccagaagtttctccgccgaacacagttcctgctgttcttcctcacggctgcctacctgatgaccggcagcctgctgctgctgcagcgggtccgcgtggctctcccacagggcccccgggcacccggccccctgcagaccttgccagtggccgccgtggcgctgggcgtgggcttgctggacagcagagccctgcacgaccctcgagtcagcccagagctgctgctgggtgtggacatgctgcagagccccctgacccggccccggcccggcccccgctggctccggagccgcaactcggagctgcgtcagttgcgtcgccgctggttccaccacttcatgagtgactcccagggaccgcccgccctgggccccgaggctgccaggcccgccatccacagccgaggtaggcgctcagctgcatttgggggagctgttcccaggaccccccattcagggtcacaggtttggtgtcccctttctctctgcaggcctgtggccttcaccgctagatggttctttccttctgctctgcaggacaggaaggggcctgcgatgcgaagtccttcagggttttgctcactcaccagctggagttccacatggctcaaggctgagatgttgtgagcaggtcacttagcgctccggctttggattcagacagacattggctggaatcctggccaacaatttttttttttaatctcagagaatctagtaggacaagtttcattgaatatatgaaaataggttgggcgcagtggctcatgcctgtaatcccagcactttgggagaccgaggcgggcagatcacttgaggtcaggagttcaagaccagcctggccaacatggtgaaagcccatctctgctaaaaatacaaaaattagccgggtgtggtggcgcatacctgtaatcccagctgctcgagaggctgaggtaccagaatcgctggaatctgggaagcagaggttgccgtgagcagagatcgggccactgcactccagcctgggaaggagactctgtctcaaaaaaaagaaaaaaaaaaaattagacgtgtcacttaatgtcaccaggtctgcctgaaatggagctaaagacgccattcctgggctattgtgacaagcaaatgtgataacacagaggaatgggtcacaaagtggggtccctgaccagcagcatcagctccgcctgggatcttgtcacaagtgcaaattctcagattctcccggagttgcctagtcaggaactctggggtaggggccagcaggctttgtatttaacgctgtctccaggtgagtctgatgcatgctgaagctgagaactcccaggacagaggccctggtatattatttggcactctaactggcagctattatgacttaataaaagcagctaatgcatatgggatttcctatgcacctgtaagtctgctgtttacaggtattattattatatcgcagttttacaggtaaagaaaccaaggcatggagaagttgagtcaattgccaaggttattctcttagtgtgggttccctagaagcaaactctgaaaccaggattcacgtgcatccagtatatttgggatgtgatcccagggaacactagtgggggcgcgggaagtgggacagggaagggaaggcagccagtgaagggtgtgttatcaagcaggttacaaatgggcaaccagacttcatccggctggaggctcagtaccagagcagaatacacatctcaaaggacccgctggaagtggcaggcctgggagacatggaagggacacggcagggtctaccatcgtcacactgctggatgccagcgtggggacagtctggctccgggttggagctgtttatgctgaattatgcagactctctctgcagggtgcagcaaatgtgcctggtgcttggggagctcccagtaagcgtggaagttgttgttggagggtgactgagctcagtcagcttctcagcatccctgtcaccacctcactgggccctgcacccgaagtcagaagaggaactgctctctggactgtaataagtgtggccagagcacagtggaccacctggcagaatataaaaggagatgaggcaggaggagcactggggcctgggttagggagggccacgagtgccaggcctaggagtttggctttattttgatcatgacgagaaggttctgtggaagagaacggagcccaagctgtccttactttaggagactgactggtagctcagtcaaataaagactggagggctgtgggttcatgtcgctgtggaaggaagttccttcagaaatcattcaggccattgcacttgctgtaggatttctcagcaaggctcgtgtgtcagaagggagggaggaatgaggagctgatgcttcagctcatttgacacaggcatgatttctgcaaactctccgcaacacaccaagagactgggtctctgtgcaggttttatcagtgaaacttctttggactaaagtatacttgaccggcaggagtcaacgttacttgagaggaagccatgtaaaatgcacacgttttaaaaatagacctgtgtattgccacttattgggcatgtgaccttgggcatagtgggctcagttcctctcttcattgccttcattccacgcttactgatgagccaccaaatgactcttcacgtgtgcacctcactgtgccctggaggagctcggtctggtgatagagtcagatatgcacccaaattatttctacaaagcacgaccgaggtctgctagaggcacgtgcgaagtgggctgtggactcagtgagaagtgacctttataactgaccagcagcctcccaaagcgctaggattacaggcgtgagccaccacgcccagccgaggcaggcggatcacctgagactaggagtttgagaccagcctggccaacatggtgaaaccctgtctctactaaaaatacaaaaattagccaggcgtggtggcacgtgcctgtaattccagctacttgggaggc[137 bp omitted]agtgaccagcagaggggagggctcagccctgactgcagagtgtatatgtctcagggaaccagtgagcccccctttactttaagttacccctaatgacttacagaagtgatggaaggggctctagtaaaagctagagagattgtggctagatataagcaggactgatatccaaatttatataccactatggtcttatcagttgttaaaataattataatacttccaggttggctggtaaatggttgctgccctgggccgctggggtgccatctacactctggctgcctccccagtggctcccagacctcccccttatccagcaaagagagggttaatgtgattccagtgccaaatggtggcaattctgaatggtcagtgccctccataggttgtcaagtattgtgaatgtgtgccaggaccgaaggaagaatttgctctcctttgaacagcaaaacaaccaagtctggggaggctgtgctctcatggtcatcagagaatgggggaaggcagggtgctggcctgcaatccctgtgggccccttcctgtcgtggggctccatgggccaagcacagccagtccggcctcactggtggagagtagcctgcagcccagccctcaggacagctgctggggcctcaaacaaagcgggtgtctctttgtggcccgggcagcccgccatcctcctgaaaggggatcctgtaaggcgcggaagctgcaggaggctccatcaatcactgagcatttcattataccttggacaacatccataatggaataaaatgtctgtaagtttactaggggaaaaatagtaacttctccatagccagtttgttttttattgatagtaatttccaaagacattccaatatcttcaaagccgtcgttactagcctcacggtatgtccattttgatgtgcaaatgaacagatgcagagtgacagacaataatgcaatgcctccatttcagctgaaaggaataaatccgcctcagagtgggtcccagtgtatccctcggaagttctttctttcctgaacattctcgcctctgtcggggagttagaaaagctgttcattctgcgtccagataaaagagctcgcctcctcttttatccccgtcgcacactgagacggggccagccaggcccgggctcgccctccacgccggtgagctccatcaaatggccagctggtcacaggtgggccactccctgtttccagaagaaccagagcctgactgcttgaaacaattttttttctctcttttattaacgtgttaattattcagctaatatttactgatccatccatcacacgtcccaggttagagtgtaggatcagaataataatggctgttatttatttggacatctgttatgtgccaagcattgtattgtatagacatacatctgttatctcatttaatttaatcttcaaacagccttatgatgtaagtgccgctatcactgttttaatgatgaagaatttgagtttctgggaagaaaagtaatttaaatgttttcattattaataacaatatattaacagtaaaaacaatcgctgctgagtaattactgcatgccaagccttgtattagacattttacatgtgttaccttatggaattttcacaactacctcatggaattggaaccgtatccccattttatagatggggaagttgaggctcagagagaggcagctgcacatcccagcttgcacagccagatagtggtggagcctattcccaaaggctgtctccatccacttcctcagaagcatgtacagcctgggaagcatgtacagccacgtgcagtctcagtctgggaaggtcttgagcccaagcaccttgaaaaccttgtggttaatttcccatctacaatgataaatgtttaataatcctgagcttatgctttggctgtttaattgaaagctgaaatggaacttctttgctgagcaacccatcagaaatttctcaaatattagttttcttttactaagtaggcaggcagaggagaaggatccattctcactgacccgggtgaaagctctgtgcagtggtccgtgctggtggcggtggacctgagacttacagaagtagagagatgcacgtgggactggatgtctgggcagtggagggcagtagcatgtgcctgtgggcgtggccatgtgtgctgatgggcgtccccagatgaaggtgacctcaagaggctcagagcctggctgggaaccagaccctttggcaaacactggagaaggtggccgttgttccctcctcagccctggggttctgtggtccgagggtctcctgggtcccttgggtcttggtgtggtggggagtcctgtctcctgccatctcgcttgttctcctctgctttgccttaacctggggccctggatattgcaccttggtgcagtcagtaagaccgtcctgacttcatatatatatatatatatatatatacttatgtacttcatgcattactgctagtccccatggataataaatagtactataattgttcattcatatatatatattcagacagagtcttgctctgtcacccaggctggagtgcagtggcatgatcccagctcactgcaacctccacctcctaggttcaagtgattctcctgcctcagcctctggagtagctg[135 bp omitted]cggcctcccaaagtgctggcattataggtgtgagccacagcacctggcccccttctttgtatttaggctctctgctaagtacaaagaaaagtcactccccgattcaggcccagaagtggatggttggcagacttcctcccctaggccactcagcagtggccccactcccccagccgctgccctggaccaggctcttggcaggaacagagacagtctcccttgccctcacggagcatccaggcctgtggaccatcaggacttttctcctcactaaaaagccgcttgggagccactggcaggctgctgggaggtcctgggcatgttacttcccagagacagcctaatttctctggaggcagtggtgcgctccccaggtgacatgaatgagcggaacgcggcccttcctggggagacgtgcagcgtgtttatcacaggtgcccgatccagatctcggcgcagctattgtgggtgtgcgttcacggcttggggactgtgtgacggcgtgtttgcaaattcccatgccgctccttcaaaacactggtgcgcgtgacatttacatgcctacccgcgtttgcatcaggactgccatctcccaacttctctgtgcatctctgggagatgtctccctccctcggggtggcagggcagggctgtgacagactctcactggcgcgtgcacggctggcttctcactgcagcatgagtgtccccagtatccccttccagggatgtgtgcaggtgaccagcctggagaggcctctgcggtcacttggccctgttgtttcccacacaggacacttgctcccattcttaacagactctgcggacacactccagagatggggtcttactccctcttgggacgacagactttatcttgaaatagctttccccgtttgaaagatcttccttaaatttgctaaaatcaaacttgccctaactgatttcttctctctggcccccaaggaggcaacgaccctgtctctcagggcatttgccaaggtagagaggcctctctgagcccagggagggcagggctagagaggaggggtagagtccatgagaggtaatccagccttcccaacttctgagttggggtagtggaagaaagcagtggtcaggccgacgcctggctcctggcagagccgtcagggtggacagtgggccattaaaaaagagaaaatgggcaggaaacaaacaagtgggaggtgtcagatgctcactttgctcagcactgagtgggagggaggtagcctgcagcactcatctcccgggtttctctgagagtggccttggccaggaaggcagaggttcccctggcttttcctaagggtgggcccatgattcctgggcctctggtattagccatgcttccctttctgcaggcacctacattggatgcttcagtgacgatggccacgagaggactctgaaaggagctgtgttttatgacttgagaaagatgactgtctcccactgccaggatgcgtgtgctgagcggtgagtgctggggccctggactgttgattctagaggcaggaaggtccagggacagttccagaatgaggaggcatatcagctaccagttggctgtcatagcataattggaactcactgctcagatcccagttttccagaagaaaggaagtttgttggcagatgacctgggtgccgggagctgggtgctgggtgatggcctgggtgctgagagctgggtgaccgcctgggtgctgggagttgggtgatgacctgggtgctgggagcttgggtgctggtgctgggtgcagggagatgcgacttccagtccagccatagcagggactcagcgtgtgactttgatgagttcttttccttctctgggcctcagtttacttatatattttacaataagataaagggctttaactgagatttctctgagaggatctttccagctctggtaggaaaagtattttcaccttgtgtctataacaaggtttactttttctgatacttccagctcacccagtagttgccagacacttgtcatgtgccagggaaatggttcctaatgtcaaggccctcacaactgactgtgtgtctgtgtgtgctgcacacacacacacacacacatctgagagaggtgggttaaacagaatcagacttccctcttcacttatttctcccacagatttttttcaccttttttttttttttgagacggagtctcgctctgttgcccaggctggagtgcagtggcgcgatctccactcactgcaagctccacctcctgggttcacgccattcgcctgcctcagcctcccgagtagctgggactacaggcgcccaccaccacgcccggctaattttttgtatttttagtagagatggggtttcactgtgttagccaggatggtctcaatctcctgacctcatgatctgcccgcctcagcctcccaaagtactgggattacaggcgtgagccaccacacccggcctcacctttgttatgtcacataaattctttccatagtcagccaggtagcaattagttatccccattttacagatggagaaactgacgctggagaaagaaaagacaaggtccttacataaacatacgttatggtctagatacggtggaaacaggatgatacattctctttttagtctcctaatagatcaggaaactgagactcagagatggtaagtcatgttcagggtctcaccgccaggacgtggtcaaatggggacttgaagcttgtgtttggattttcagtctgggcttttcacatctaaatccactgatttgaaagtgttgactgctttctgtagctgaagtcctgtgtgattcattgagggttctgtttccaacctttctttacctacggtattactaggtcaaagtaagtagagaaatggctgtggagatgggggctgtgcagtagggcccatgtgtaacaagatgtgacacgtggcaggcacttcagaccagctcacggccgctcaccatgggaagctgttaaatgtttagagttgttgtgagcccgttctaaaaccattgggagcttaaaatctcctatagtgggagtgtttacatcacagaaattggcaaacagtacaaaccagagctctccctgtcgcatactgagaaccagcttacaggcacatcacagatttagacccattataacctgtaaccacggcactctgcagggcagagctcagggctggcaagagggaccaacggggctggttccattcgtttatcacaaaggaaagactgttgcctgaacttagcctggtggcccttgagtctggctagagactgattcctaaggccagccataggccgatggctgtggcccctgtctgttcacctagacccaaactcagcttcaagtccagtccgtttcctgactccagactcagttgccattgcatgacccacataaatcctctccacagtctgccaggtagcaaggagttatccctcttatacagatggagaatctgaggctggagaaagaaaagacaaggtccttacggcacatgtatacatatgtaactaacctgcacgttgtgcacatgtaccctaaaacttaaagtataattaaaacaaaaaacaaaaaaaaaacatactttctaatctacatcaagctgaaacagtctgcagtttagaccgcagccctagctctgggccaaggtccggactcacccaggcctcctccctgcaggtcctatgtctacgccggcttggaggccggggcggagtgttactgcgggaaccggctgccagcggtgagcgtggggctggaagagtgtaaccatgagtgcaaaggcgagaagggctctgtgtgcggggctgtggaccggctctccgtgtaccgtgtggacgagctgcagccgggctccaggaagcgtgagtgtgccagcctcttcctgagctttgtccgtctgtcccacccgctctggctgcccatcccccacaacctctcaatgaaactacctggggcagaacctgtgccaacctctgccctcccttccctattgccatcactggacaggctcctggcagggcagggatggggttaggatccatcgaaggcttaactgcttgagttcatgactgaagcatacctttgcctgtcccctgcaggagagagaaactgattagggggcctgggtatgcctcagacatgctgtgtggcctccggcagctcactgcccctctctgagctacggtctattttgtaaattgcagagggagacctagatttctttcttttttttaatttttatatttgattttttatttttgagacagagtctcactctgtcacccaggccaggctagaatgcaatggcccaatctcggctcactgcaacccccacctctccggttcaaacaattctcctgcctcag[136 bp omitted]ggcctcccagagtgctgggattacaggcgtgagccacgcacccatccaggagacctagatttctagcagtggtgtgagctagataatcagaaaattccctaactataaagcacctagaaatgctgcataaaatttagcaaacattattgtaaatgcatagctgaactagcagaaaagtaaggcaatcccttggatccaaaaatgaagaaagaacaaagacccacagtggagagagttagagataggctgtgtggccgtggggctcagcggagggaagtcgccaggctgcatggccactctgtttgggtcttaatgtccaagcaggatagggaaggaggccttgggcttctcagggtaaggaattggaccctgaaggggcccagctcaaaggaggaatgggaaactcaggtttgtcctcactgcaagatgatgagcacaaatccgcttcctctaatcacagaaggctcctttgtaaaataatagggctgtgcactgttgcacatgctgggggccattcttttcatggctgggagaggcagattgggaaggagtcagagcctgggagaccacccccaccactggcaagggtaggacagtggtgatggaggcagaggcacagcccagggtccaggctcaccgcctctggtcatgccctagtaacagggctccaggagagctgacggatta[140 bp omitted]ggtgaaaacccgtctctactaaaaatacaaaatttgccggatgtggtggcaggtgcctgtaatcctagctactcaggaggctgaggcaggagaatcgcttgaacccgggaggcggaggttgcagtgagccaaaatcatgccattgtactccagcctgggcgacagagtgagactctgtctccaaaaaaaaaaaaaaaaaaaaggtattggatcaaaagctaaggcttcacaggggttctggggagggctgtcgagtgagttttccaagcagcacagaagccgagccctgagaaccgtgggtgaacctaaaggccaccctggctggcaactgtctgtggggtcacagtgcccagaagagctgctccgtgtttgaccccagctgaccggggcttcttagatgcctcttgcattcagacaggatgtgtctgggagctcaggggtccagatggggcaatggggacaggggcggagaaactgaccacacatcgtttagctgacaggttcactagtgacaccatgaacttggcagtgtctcaccgacacctactctgccaggccctgacctcatagaggggtttgccatggcacgtgggcacagtcctatcctgtcacctggacatgcaaacgggcttcctgaggaccaaactgctccacgctggcttcttggagcttttatttctttggtttcaaacaacattcctgcccccaagtaagaccaattctatatatggactcccggcggccctcccagccccatctgcctgctcagtaattgattctgaaaggcagttgttttgctttaggttgcccatggattaagagacagatggtccaatcattcaagccagccctagatccggagttggctggacttgctgtcatggttagtgttgaagatggtgtcctagctgcctctttgggcaggctgtggagccccccgtgaggtacctttgccttcctgcccccttcctgagggaatgagctgacaggatctctctcaagaggtgaccaggtgaccaccattgtgagctgcagcttctgccagcaaggagcattcacaaggagtaagacccatgaatttgctccccaggttggaatcggagtgggttctgagcaagtcatcaacgtcttcgccttggaggcgtcattctgccaagtgaccctcaggctcccacctggggaatgagggagactggactgtaccaggtgacaacctgtgtcctgagagtcgcatcagtgaagtgcggaggcagccaacacttccttctttagcggctcatggaccactcacctgttgcagtatatgcagtgccttcctgctttatctcattcagttcattcgttcgctcaccacgtagtgggcacctgctgtgtgtcaggatcagggcttggtgtggggaacacaggggtcacccaggatgtagcttccccccaggagctgtgttctggaggcctcatggcccccttttgtccctccctgtggcccagggcttgctgaaatcttgatccctcccccatctctggattgtgcctaccctgatgactctccccattgtctgttctatccccgtggagctggttgaggaccagtgcccagtccattgaaatgtttgttctttggggcatcaatcatgccaaagaacaggaaagagttttgtgagcccagcacctgccaccaccctcgaccttgacaccaaaagccagggcagacacacggtggtggggagacatggccccatcaggggatgtgcgtgggtatacattgttcctcatgacaaccctaggaactacgctgtatgtaggtgaggaaattgagagtctgagcccgagacatggcagagttgcagagctggtcactggcagtgcaaggacttgaacctaagcacttataaccctaagccctggtgttttccccacactaggctgttgtctgtgccctaataggtcgtgccctgacacgtgcaccacaggtgctgtggtcagttgagatgggcttccagatccagggtttggtcctacttggcagattctggctggtaaaagggtttctgtttgcaccacgtggtgtggcagctagagagccaggggagatactgagccctgggagaccccgtgtagagaagagcatggggtaataatcaggatgccatctagagaaaccctgatgagtctggaagaaatacgagcagttggtgcaagaacattccagaaagtttgttcagctccaaggaagccagctagggcactggacttttccacctggaggctctacagagcagcaggaggcttggcaggaggcttctttgtaacatgggcttgaggagttcctagaaattgagtgggagttcaagatcagagagaggcaaaccttgcaaagaggcaaagcagtggtatgactccaacggcacagcaagaacaaacatggctgggtttcagatttccatgtctgcttttcttttaatgcatcttccggtaggacattgaatttttcacaatatcagcctctcaggtcacctaccatgggaggaatctggcacctagtaaaagcaccatccaaatttgttgaaggaaggaagaaagaaggaaggaaggaaggaaaaggaaggagaaggaagggaggaaggaaggaaggaaggagaaggaaggaaggaaggtaggcaggccggcaggaaggctggcattatggagaactggcagaagcaagagagggaaggaaggaaggaaggaagggagagggaaggaaggaagaaagggagggagggaaggagggagggagggaatggagaactggcagaagcaagagaaggaaggaaggaagggaggaagggagggaggaagggaggaaggaatgacttatggagaactggcagaagcaagagctgagcgctgcagtttcagccaagtggtcccttgtagatgaccctggacggtcaaggtgctgatgcctggtttctctcagaagctcagcatgactatgtcccatgcagggccgttttccctccctgatttgaactcgcctcgtaagtttatttatacctgtctcaggacctaaagccagcattttccctggtgacaggcaccaacaactggacaccatctcttaccagaaacccctctcttttcccccagggcggaccgccacctaccgcggatgcttccgactgccagagaacatcacacatgccttccccagctccctgatacaggccaatgtgaccgtggggacttgctcgggcttttgttcccagaaagtaagaccaagtgatcatttcacaaccctttcctttaagtgtgtgtggtggtcctgagagaggggggcacatgtgctgggctgcgggtgtcccctctggcagtccagatgggagcagaggaagggggcatggatgggaggcaggcaccaggtaccacagagggagccggcagggagcccttcgcctctgtccaccatgtgaggctgggtggggaattgtcagcaaggcttgtaaagccgaaaggagagtgcctttctggatgcgaactcttgccacaagtgtcagatgttaaattgacttggtttggaagccagaagatgctggctcgggacttggggatagctgatggattttctgttattggtgctgacggtgttgggccgtgaatctgatgacaggggctggagccacacttgcatctttggtttagcctgggctgaggagtagagcgtgaccccatggaggggcagggctaggcaccaaaggccactgaccccgcattgcatggtagctctggggtggggaaagttggtcaaggccagaggtggcttgcaaaaagcagggcctggagtgtgtgaagcaaggctgggggagacccagcagactgtgtccaaagaacattgagatctcgggctggagtcaggcagactccagattggggtggatgctgtggctctagaaatggcccttggtggcagtaggcttggggctggggctgtttcacatgcgctgggattgctgtaccctcaatgtggctttgatacttggcaatgtaatagaacagggctaaggtgagaggatggccttggccaggatgatgatgacgattatgacaatcaacagaagctgccattcgttgatcgctcattccatgccaggtactgttccaagcgctttatgggttaactcatttaatcctcctaacaaccctacagctaggtgctgtgattatctgcattttccaggtgaggaaactgaggcagagggtttgagccgtgtgcctgaggtcacacagccagtaagtggtggggtcagggtttgaactcaggtagctccatagtctgctgtgggttgaagggtgcaggggtggacttcaatgacagcagatgtgatcggatctgcaggagcagcacagccatcctctgctgcacccccccactcccgctctccctgcttcatgtgttcctccgcactctggggacacctcccttggagggggctggagaacaagggggctggacacctcccttggagggggctggagggggctttcatatgtgctttcttcttgtccaagtgcatcctttgaagtggctctcctgcgtcaccagcatttccgaagccacagccaaggatgtcttgggcatcagggcacccacgacacaattaaatgagccaaaaaggcagtttgttgatttgcggacatctggcctggggacctcctcatcccttctcctcctcatgggagcagagcgatgggtagaggcagcaaggatgcgcgctcagctgccggccctgctggtgctctcaggagaatgagccaccctcctagggcttccctcacacctgcagctcagagcagttcccttgagaggccctctggttggaatcaaaggaactctgtggtccagaccaggctggaggcaggcctgccttgagcaaccagcttggatagtcctgctgtgtgctgggcatggcactaggagccttcctgcggggggttatctgctttaatcctcccagtagctcccaatgggggatactcagatgcctgcttgctgcgagaggctgggcaggtgtgcagagctgagagccctcaaacacaggcacagagtggccggctttgcagctcctgctcctgatgccacacacagccacacactggcacagagcggccggctttgcagcccttgctcctgacgccacacacagcccgtggttttacacactgctgccattcggcgttatggaagggggaagagacggagaagatgaggaggaagagaagggaaagaaaggggtggccattgtggccatgagccattagtgtttcggactagttttaaataggaacatgcttacttggagcataatgaagacgccaaagggcatagcagggaagccttcctctcactccatgcatttccttgcctggattgtcctggcttctcatgtctacttccagagagactgaatattcaagcaactgcatccttgcccattctctaacaagccccgcagccgggcaggagctgcacccgcccttctgcactgaactcttcaccggacagcctgtctcggagattgtctcacgtcgcgacacaaagtgctttctcattcttttttaccattgcacggaggtcctataatttatttaaccagtttagcatttcgcctatttccagccttcacaaacgatgcggcagtgactacctgtgtatgtacgtagatcactttgtgtgagtgaatctgtaagaaaaatattccttggagatgctgggtcaaagactgagtgtctttatcattttggtaaactttgtcaggttgtccttggcgaggattgtattcattttataccccgatcagtgatgtgtgagggggaggcaaggcaccctcgtaacccttattttgtgtgtgttggggggctcaaagcagcattttaggcagatgcctcagttttctgggggtcctccctttgtgtacctcattagggcccagagagttctttcttttttttttttttttgagacagtgttccgctctgatgcccaggttggagtgcagtggtgtgatcatagctcactgtagcctctggctcctgggctcaagtgatcctcccaccttggcctcctgagtagctgtgactacaggcacacactaccatgcccagctaatttttttgtgtattttttgcagagacaggggggcggggtggggggggtctcaccaagttgcccagactggtcttgaactcctgggctcaagcaatctgccctccttggcctcccaaagtgctgggattacaagcatgagccactgtgcccggctggtccagagagtttgtatttgtgattacagacaagaatttaaaggcttataactcttcaacttgtattttcagccttccttcatatttactggcataaatccagattgctgcagtttcacactggagcatgtgccagaagatacacgcaggctcttggtgtcttgtgctatcacacattagcaccttgtccatctcccctcacaacgcatttcaaggacaagttcccttctctgctatggccggagcagtcgtgaattgtttgggtcagaactacatggaaagggcatccaggtttctcagaaacagcctctgtcctcagcactcacaacactggagccagtgctgacacctgatccttatccgggctgcctctgcgtggtcagatgggactgggagggtggtgtttcctgagttccattgtttagggctgcaacatttgcagctgtgaggaacagagtcatcatttccagctttaaagtttaaagtgggtattggcagcgcatatttagtgggacttggcaaaacgcaaatgctgagacggtgggcacagccaggggcaggtgactctcactggtggcagagtaagggcagtgcctgaagaaggtgaagaaggcttggaaggaggctgagaaaggaagatggttgcaacttttgggaagggttggaactggaggatgtggggcagtgttggcaggtggctgaggggattaaggagtgtgttccaagaagaggcaactgctgagcaggaaccaggtggcaggaaagcagcccaggtggcccagcgtgcagggttacttggggggctgtgaaaggtcagggggtacaaattgcagagggctttgtgatacaagagttattaagaagttattttaggcagaaagtaaggttctgggtggaaattttcctgtaataagaaacaacccccaaaccatctcttttctaacagaaaaggcggcttaaagggccaggcacggtggctcatgcctgtaatccctgcactttgggaggctgaggtgggcggatcatgagttcaagagattgtgaccatcctggccaacatggtgaaacactgtctctactaaaaatacaaaaattagccaggtgtggtggcgcctgcctgtaggcctagctactcaggagactgagggaggagaatcgcttgaacccaggaggcagaggttgcagtgagccgagatcacaccaccgcgctccagcctgggcgacagagcaagactctgtctcaaaaacaaaaaaaaaaagagagcaactgggttcactcaatatggtgattcccactgtcttttccttgttaccaggtgtaccgagtgtcatggccacctccagataacaccatgtgttcagaacatcatgatgacctgcatttgcatattaaaggactaaggtgggagggccaggtttttcaagggctacgtaaatgacacacctggtcaaaccaatcccctgggccttatggaacgcagacaccgcttcctccagcatcccaatataagcagccacttttccgctgcacacggggttttctctttgttcaaatcccccctccctctgtctctgtacggggagctgttttcttcttccttccttctttcttgcctgttaaacttttcactccttaaaatcaccccacatgtgtccatgtctaaaccggcacgagaccaagaaccctggtgtccctccagtcatcagagccatatagcttgaatgcctgcctcaaggttgagacttttttcagtgggtgggaggggctggtatggcttgtgtggcactttatagctgcaggtaggatgttctggagcacggagaggatgagagctaataaagaagggagtaggtctaagagacaccacagggttggaatccacaagagaggatgtgggggcatgaaagaaggagtgggaacccccagggaggaggatgaggcatggatgggtttgtgggtgagcggggcagctgacctgtccaatgtgggagggaagttctccttggatccttctgggatacagcatttctcaggggtaccctcagagatgccttggcaaagctgccacagaagtcgacctgtgacctggttctggagttagggatttcaggtagggcaagaacagtgccctggatgtcatgcctttaagtcaaaccgccatctgcccaacggagcgagcctttggctcccagattgtccatccattctcgcttgtctcgcccgtggatgtgggtgtaacttgaactcaaaccgtctgtactgttagcccctcagctctgagctctgcagatgcctggcaggggttttgctggaattctgacttcactctagagcaggggttcacagccttggatctgttggcatttggggttggatattactcatgttgggatctgtctgtgcattgtaggatatctagcagcatccctagcctctacccactagatgccaacagcccatattccctcagttgtgacacacagtccccacacattgccgtatgtcctctggagggtaaaatcacccctggttgagaaccacagccctggagagccacctgaagatgccaggcagccatgcccagtcatggcccatatccccgtggggctgaatcctggggagcaatggtctcttccaaccattgtgaggatggagaagcaaattctccctctagtattgaggtctgatggatgtgaaattgtttggaagttgatctgacccagacctgcagaggccagagaactctttgcagggaatggtatcctctcttccctcctgaatgttgagggtggcgagagaggtgaatctggggatgtctggccgtatttgcctgctctgaagtgccaagcacgtcctctctggaaaggccagtggtgtggaggctgcctggcagtcccggtggcagctttatctcatcctaatttggccgaaaaacaagctcaaatgtcctatgatgtgggaatggttaaattatgccacggccatacagtggactataatacaaccattgaaaatgttttcaaagactttgatgatggaaaatgctcacagtagaatgttaaatggggcagagctgagcctgggggtaggaagctaggggcttaattagagctggccgggcagtggggctgggagcagcagatgtgagaggtggggcttggaaacaggaaaagaggagggggttccttgtagtgcccccacctttgagcaccatctgaggcttatttgtggccccagataaaatgtctactgtttttgctagttcgcgaaaatggatttggggagatccaagagtgtagtttgacagaaaaagaacattccaggtgatatctgcatcttaatgatctgactctctgccagcaagagggaattgaccaatgtaatgtgtttttaaagcccagtgaaatgatcttgtctaatttcctgtgatcgtatggagatggaaagagacctgctcattctcagtccccttcaggatcctatcggctcctttgtttcaacgcaaggcaagagtgagcagggggcagcttcgatatttgcattgctaccaattcagatctggggtaattagttttgtcgcctgatatttgtgctcaagtagataggccatttgtgggggtgctccgaaaggaggctgatgagcgaaatctaacaccatctgcaaataggttactaatgtgagacactccaccggcgattataccttgtgatgtgaggtttgttctcccagctgctgttagtgattctactgataaaggaatcgcagggagaggaggaagaaaggtgttgagctttctttttcccctcttttagcctcttttgggcgtctaaattctttacgcattaatcacctggatgttttcccattgacatttcttctaagtttttttgcttgtttggccatttaatggtggtgctcatctagccacctttcaaatggaaaagcatgcattaatatggaacctgtttgttctcagctgggcagctgctcttgcaaaatccacttggattccaatagattcggtctatccaaggtagccttatggtctccatggggcacccaagttcatgtctttgccaatggttgggtctgtaagagtctgggttttgtgagccttgagaataagaattttctctttgacaaaatgctgtagtcattccaagagctattggatatgctttgaattgcttataaaaagtctgtggtaaacctgttgatactgtactctctgcatattttgaaaaacacgtattgtttgtttttctggggggttaacacatatctattttagagaatttgaaaattttccaagtgcagaaataaaaatagaatgcacctgtaacaactaataacattgaacatctttttggtcttttgttctaggtgtatctctacgtaatttgttttataaacattgactcattccttctcacatttgttcctttttctcattgaatatgttgtgagcattttctttcaccgtgctatgccttatcgcttattggcattctgtcctctcctgagggacatttaggccatttcctttctttttttttctttttccttattgctgttataaacaatgctgccacaaacatccttgaaaataaacctttgagcccattcataagtatttcattgggctatattggcagataaggaattgctggggcaaaggataggtacattttatatgagcccttttaagactttttatacattttgggaagtgtgtcttctagcctcatccttctgaagctggtaaaagggctttagagtcgtggtaacctgggttcatactcctactccaccactttctcattttgtgatcctggccaggtcacataacacagagccttagttttctcgtctgctaaatgggatgggtggagatgaaagtgcctcaccagactgtgatgaggattcagtgactttgtgggcacgaacagttttgtgatttatgttttggggtgtgtctggagtagcaagtgttccagacaatgcttatgatcattgtgattattcagtgtcccctagttctttcagtgtgtgggggatgtttgagaaacttcctgggatgaagagccagtcctttcccaggtcagtggaaagccaggtaccttaggatcccaatggttgggcggttctgagtcacactgtgtttcacagactcttctgtctgaaggatgtttgtttggctttgatagggatggtgttacctggggtggttggtgggttaagtaggtctgctgtctggggctcaagtcttcagagagccatctgcccctggagacatcccacatcccacagggtcccctggagacactctgacatttgccacaaacaatcatgcttggcctgctctcatatgcatagagtggatattgcagcctctgtttagagtgtgtgctacagcgcacggagaaggggactggtgagtgtactctttttgtggagaaaagtgaatgctgtgggggtgggaggaagcccctgcctctgaccccatgcatttgcctcccctggactcagcccatccatgcttactgagtgtctactctctgaaaggcacttcaagagtatttcaatccccagatccaccatatggatggaggaaccaagactcaattcagctaaatttaaactcacacctatagactccagagcctgtgttagcccatttgcattgctataaaggaatacctgaggctgagtaatttataaagaaaagaggcttatttggctcatggttctgcaagttgcataagtatggccctagcatctgcttccggtgaggcctcaggaagcttccaatcatggtagaaggtgaagggggagccagcatatctcatggtgagagatggagcaagagatggggaggaggtgccaggctcctataaacaaccagctgtccgtgaactgagagcaagaactccctcattcattaccaagcggatggtgctaagccattcataaggcatccccacccctatgatctaacccctccaaccaggccccacctccaacattgggggtcacatttcagtatgagatttggaggggacacacatccaaactctgtgagagcccttagtcattaaactgcaagcccttttacagatgataaagccaaggctcagagatgcccagttgctcgttggcagtccatggatgggattcaaagcccacagttcctgatgacaagctttgtgttggttccactcccagcatctgcctctccaaatcacaaggccccattctcagttacagcatcactggacaagttttcagccaacctgacatatgcctgaaagcaaaagtctgtcccctttgtccccagtccttgaagtcatctttgtgggtgtcttctttcctttttgtaccttgaatatccagatctgcctctggagtgaagggaactgctctggaggcaagagactggcagagctaacctccatattggtttgcagatttcactggaaacccagcacatccatgtatttgcctcttaggagttgagctgtgttgatgtggcaaggtcctggacttggagtccagaaggctggctccttttcccactcacctggcaggctgggcatcctgggctgttcactgcctacctccgagcctcagtttccccttctgtgatccctgaaatctctgtcattctgtgtaaccctggggatcctagaaaagtgctcaaggaggactgaagatggaggagatgatgccgagaggggctggtttgttacagaggtcccgcctggaaccttgctccttacctggaggaatgttcactccttgacctagtggccacagaccaagcctcccgcatgtggatccccgccagcctcagagccctgcccttgctgagtcatgaccttgctctaggctgaatgcccacccatacctcagcccagcccagcactagccgtgcgtccagaccgacccaggctcaggctgtagatgcaggatcaggatgaggatgcatatctttctgccctcggacacaggctgagccagctctttctttaacccctcacctgtctgattgaaacaatcccaaatctatcttctcactttctttttttgccttgtattcttggatccttttttcctcttctttctctcactgaagcaccctttctctctctcactgaagcatagggtagggtgcgagaagcagggaagttggcagagagataagattcatcaatatttaatttttatggaaatcatgtcctagaaatccccaaggggctgaaaattgtactgtgttttcagaatccagtgatgttgctggagcggtgatgttgtaaataaaaccacattactgtctgcagctctcctgtcgctctgcaaacacccggaaacttgacagtttaatccactcaaggaagcaaaaaggttcgggtcactgctgggggcagcccattctccagtcctgggatataagattgtggggcatcaacgtcagtggggctgttactgctgggaagggagacggagccagcgtgccttgagtagatttaccatgctggtggattttttttcctcggaacaggaatcccaggacagcagagccccctctgggctttctgatatggggaagatttgcttagagatagcggcttttcttttccctcatgcctgtggtgcagttaacccaatgaccagcagaaaaatcagactcaagttagtttccagcagcttctggtgcaattgggatttggaagggacattcatttgcttcttcattcattcactcattcattcatttcttcattcatcaaacatttattgagcatctgccatgtgcaaggcacttttctagattctgagaatataacaaagcacacaaaaaacacaacaaccctgcttatgttcttgtggaaagaggcagacaaccaaccaggtaagtaaattatatagtatgttgtatggtgatctgtgtcatggaggaaaaggaagtaggaatcataggtgtttacccatgagaaatgcaaacttttttggaccaaaggcttgcacaagaatgttcagaggagcattattcacaatagctaaaaaccgggaacagcccaggtgtcaatcactagtggatgaatcaacaaaccagtgcattcttggatggaatactacacagcaatgaaaaaggaatgatccacagacacagataacaacatgaatggatttgacaaatgtttttctgaatgaaagaagccaggcacacaaaaaacatgtgctgggtgattctatttatatgacattccagtatagataaaacgaatccatggtgatagaaatctgaaaggtggttgctctggggagggaaggaggatggtgaatggggagaggggcctccggtgtcaccgatgtgctgcctgtcttgattgaatggtacacctgggatcagagcatgtcatcagataggttagtacacaaaactgtaaagcatggtgagggaatagcatgtggtggtgatggtgggaagggtttgcaacttgaaaagggggtggccagggaaggccccacagagaaggtgacttgaagaaagtgagggagagagctatgagggtatctgggtgaagggcattcctggcagggggaacagcaagtgcaaaggccctgaggtgggatcatgagtggagaagtcagggaacagcaaggaaaccactgcattcatcaacttggctgctatgagagcgtgccacagactgggcagtgtaaacaacagacatttattttctcattctggaagctgaaagtctgagatcaaggtctcagcagggttggtttcttccgaggcctccccacttggcttgcagatggaagccttcttactgtgtccttgtgtgcttgtcccttggtctgtgtgttggctgtatcctaacctcctcttcttgtaaggacctttgtcgtattagattagggcctaccctgatggcctcatttgaacttaattatctctgtaatcccagcactttgggaggctgaggcgggcagatcatctgaggtcaggagttcaagaccagactggccaacgtggtgaaaccccatctctactaaaaatacaaaaagtagccaggcatggtggtggctacctgtaatcccggctattcaggaggctgaggtaggacaatcgcttgaacccgggaggcagaggttgcagtgagccaagatcctgccacagcactccagcctgtgcaacagagtgagactctgtctcaaaaaggagaagaaaaaaaaaagatcctacatccaaataaggtcccattctaaggccctggggttaggacttcaacatatgaatttgggggacacagttcagcccatagcagccagcatggacagaggtacctgagacacagatgggccgccgtgtgccgtggacatccgggctgcttgtttctgctgctccctgtgatgaaggtgttggtgtggaatgaggtgggatgagggttttgtgatagagggtggatgaagctgtagaggccggaggtggcaattcttgaagttgcctttcatgaattcacatgaccggggaaacttgcttctggaaaagccagcagtgttgagattgagggtcaggccccagctctcgctttccatagaagagtggtgtaggggccgtgaggatgggtctagttggacgtactaccgaggctcaatagcctatcatgcactgactcacagcgcaggtgcctccttggcttgaagaaggacgaggagagtcgggagaggctttccttgggggctgcttggcacctaggagagcatgcggcctgtacttataagaacagcctgacagtggggggcaacctccaacagcatttcccctgactccctccaaagatacctgccctcccgccaatgccccaggccctgcgtcatcttcgcttgcatgggacacaggctgttgtcttttatgagtgcccaaatcctcagctttacctagccatgctcaaaaaatgctattgattttctttttcttatttatttatgagatttttgctgtgagcaaaaaataaaaaggtttgtgcagtgttccccttagcagtgagaagttttctccacccactgcctccctccctggcacacacactcacagattactctctcatctctctacgctccaaaagtcctagcatctcccgactgtaggatgcagagaaggaagagatgaaaaggggctagtgcctggggcagagtgaggactctcccatacatgtgggagaggtgggtggatacatttttgagcaagacacagctgatgcccagagagttagggaggtcgagaatgacctcttcctccttggaagcatgccaggcccggtgctgggcactttggacctgtctcattcagccctcaccttaaacctacaaggcagattttattacttttttcagtgatgaaattcaaagaagttaggcaccttgctcaagggtgcctagcaagcgagctagaattcactttcacaccttcaggatgccagctctcttcagtgtgtggtgcagcctccccaaaggggaacaaggacccacttaagagactgctgggagctgggctggcccacagagtgagacgactcctctctcctacccctgacagggcccccctccattttgaagaatcctccttgggctgagcatcttgggtgggaacaaagtctgttcttctccaccccttccatctttggaaagatgactgtatgagaatctctgcaccctgcagtgggacatctggcatgagagttggttttagtctctttccagggaggtggctggccaaggaagaccagagggaatcgaatctcagtcctctctcagggcttgaggtctgttcattagtggtgtgacacgtggatccttggggatgccctaagtcagctgatctgccccgctctgtgccatgcagacatccactcatatggatgcccctgcccagagtgccatttctatctctggcactcctgacaaatgccttggaatctcaaaaacatgattccagcctctgccccctgctttctgcacgtcgctcatccctcagtcatattgctgctcatactgttgacttgtcaaggaaccaaccaagtagggctgtgcttataagaacatgggctacttgagctgcttgaagctcacatcttgttgatctttgtctcccctggaattgggcacagagcacagtggtggaaggatggtggtcatccctgtggattccatacagatacagctggcaatacatcgtccatgttcatcccattcctgagccctgggaagcatgaccctcaaattcactcagtgtgcttctcttcttatcgttccctggcaggagttccccttggccattctcaggggctgggaatgctactgtgcttaccctaccccccggttcaacctgcgggatgccatggacagctcagtatgtggccaggaccctgaggcacagaggctggcagaatactgtgaggtctaccagacacctgtgcaaggtgggttctgcatccccgactggtagtggcatttggtctggggggtggggagagcttccagggtttggagatgccagtcatggccaagcatgcagttatgaggtatggcatgtgtctgtgtaaaggtcttggcatcttgatgggtgttggagataatggggagggtcagttttccaccctccacagaggctgaatcctggactcactttaaaaaacactggaccctttatctaagtctctctggagatgacaatggtaagaggatgaacagagaggggcaggtcctagagagatagcaacagaaaggtggtaggattgggaggcgtgggaagaatgagatcccaggagctgcaggggccactggtgcctccaggacctgggaaccctccttggtgtgagcatcaggtctgcccctgttgaccttaggaactgatgaaaggaagagccggggacgagggatgttaccacctttatcaagtgcctactgtgacccagcatggccctggatgttttggggctttcccctggtgatttcatgtgctccttgtagcagccctggggatgagacataacgaatgacttgcctgtcattagtccagctctggtttattgttggcagtacctgggtgtgttactttgctcagcctagcctcaatccccacccacttcccctattagaatctggaattatctgtgctatgtcaggagcaagagtttggctgtggccatagagacagaatgggagtcgagggtccatagggtgtctgattcccatcttactcctgcactgcagtattgcaggcctcattacggggctttctcggactggccacagacctgtgcagctaaggtatatttggaagatctcttcccttctttgggccttggttcccccatctattaaatgggagtcttcgttcatcagttcctctaagggagtttagtggtgaattggtgagtcataatggaagtgagtaaccccgtgatgacttttggactttcagacactcgttgtacagacaggaggttcctgcctaacaaatccaaagtgtttgtggctttgtcaagcttcccaggagccgggaacacatgggcacggcacctcattgagcatgccactggcttctatacagggagctactactttgatggaaccctctacaacaaaggtaagtcaaagctacaggggacgatggaaggcagctcccggtgaccaaactgtcaccttgccagccaagcttctcagagcactagagcagtgcatctcaaacttgagtgtacataagagtcacctgtgggtggagccactgtgtgccatactcacccttcaggtattgaagaccagcccgcctggtggtccccatccacaacaaagttacgccattgtatccacaaacacccacgatctaggccactgaggcacttgcagacaccactgatattgattacagccaaagaaattacactgagactacactactccaccacccagaaccaaaacctaagcatgctacccaacccacactataggatacatctactagaaaaagtcttttcctatgaaagctgctccataaaattggaagaggtgactgttccaccagatgtgcagatatcaatgcagtcacacaagaaacatgaaaaagcaaggaggccaggcgcagtggctcacgcctgtaatcctaacactttgggaggctgaggtgggtggatcgcctgaggtcaggagtttgagaccagcctgaccaatatggtgaaacctcatttctactaaaaatacaaaaattagctgggcgcggtggtaggcgcctgtaatcccagctactcaggaggctgaggcaggagaattgcttgaacctgggaggcagaggttgcagtgagtcgagattatgccaccgcactccagcctgggcaacagagtgacactccgtctcaaaaaaaaaaaaaaaaaaaaaaaagagcaaggaaacatgacgtctgcaaagaaacacaataattctccaataacagaccccaaagaaaaggaaatgtatgaaatacctgaaaagtaatttaaaataatgattttaaggaaactcagcatgatacaagagaatacaaatagacaattcaatgaaattaggaaaacattttatgatccgaatgagaaattcgatagaaatagatatcatacaaacaaccaaacaaatctgttagttgaataattaaaatgaatttttaatgaatgaaattaatgatctagtctgttacaaaagctctcaactgtgtttttaattttataccaaaacctatgggatacagcaaaagaagttctaagacaaaagtttacagcaataaatgcctacatcaaaatagtagaaagattttaaataagcaacctaatgacgtacctcaaggaactagaaaagcaagaacaagccaatccaaaagtactggagggaaagaaatgatgaagatcagagcagaaataaatgataaaattcaacatccctttagggcaaaaacaatcaacaaattaggtatagagggaacgtacctcaccacaatgaaggccatatgtgaaaaacccacagctagtatcatactaaatgaagaaagtgttgaaaaccttttctctaagaactgaaacaagacaaggatgcccactttcaccatgtctgttcagcctagtaatggaagtcctatgcagcaattaggcaagaaaaagaaacaaagggcatccaaattgggaaggaggaagtccacttgtccctgtttgcagatggcatgatcttacatatagaaatgcctaaaggcttcaccaagaaacccttagaaccaataaatgaattcagtaaagttacaggatacaaaataaacatgcaaaaatcagtagcatttccatataccaatagtgaactacccgaaaaagaaatgaagaaagcggtaccatttaaatagctatgaaaaaatacctaggaataaatttaataaaagagatgaaagatctctgcaaagataactataaaacacttatgaaattgtagaggacacacaaaaaaatggaaagacatcccatatttatggattggaagaattaatattgggaaaatgaccatgctaccaaaagcaatcaacagatccaatacaatccctatcaaaataccaatgacattcttcacagaaacagaaaaaaacaattctaaaatttgtatggaaccacaaaagaccctgaatagccaaggcaattctgagcaaaaagaacaaagctggaggtatcacactactgacttaaaaatatgttacaaagctttagtaacaaaaaacagcatggtactgctacaaaaacagatgcatagaccaatggaacaaaatagagaacccagaaataaatccatgcatttacagccaactcatttttgacaaagatgccaagaacatacatttgggaaaggacagtcttttcaataaatggtgttgggaagactggataaccatatgcagaagactgaggctgtacaaatggtgttgggaagactggataaccatatgcagaagactgaagatatacccctatctctctccttatgcaaaaatcaactcaaaatcaagacttaaatgtaagacccaaatctattaaactgctagaagaaaacggggaatatttcaggacattggtctgggcaaagatgtttttgcttttgagataggacctcaagagcacagacaacaaaagcaaaattagacaagtggtattatgtcaaagtgaaaaacttctgcacaaccaaggaaacaatcaacagagtgaagagacagcctgcagaatgggagaaaatattggcaaactattcatccaacaagggattaataaccaaagtatataaggaactcaacaacaaaaacccaaaagaatctgatttaaaaatggacagatgatatgaatagacatttatcaaaagaagacatacaaatggtcaacaagtatatgaaaacatgctcagtatcactaattatcagggaaatgcaaatcaaaaccacaatgagatatcatctcgccccagttagagtggctactatcaaaaagacaaaaaataacaagtgttggagaggatgtggagaaaagggaactcttatactctattggtgggaatgtaaactagtacagctcttacggaaaatagtatggaggctcctcaaaaaaaagtagaattgtcatatatatgatccagcaatcccactgctgggtatatattcaagggaaaggaaatgagtatgttgaagagatacctgtactctcatgcttattacagcaccatacacaatagccaaggtatggaatcaaccttagtatctatcaataggtgaatttttaaaatgtggtacatatacacaatggctagttagccgtaaaaaaaaaaaaaaaaaaagaattaaatgctgtaattcacggccacatggatgagcctaagggacattatgttaagtgaaataaaccaggcacagaaagatgaataccacatgctctcattcatatgtcaaagcttaaaaagttgatctcactgatgtggagagtagaatagtggtcactagaggctgggaagggtaggagggagggcaggatagggagatgttggttaaaggatacaaaattacagctagatatgaggaataagtcctagtgttttatagcactgtagggtgactacagttgacaataattgattgtatgttttcaagtagccagaacagaggattttgaatgtttccagctcaaagaaatgataaatgtttgaggcgatggatatcctaattactttgatttgattattaaacattgtatacatgcattgaaatatcacattgcaccccataaagaagatgtacacttatcatgcatcagtttaaaataataataaatatatttatatttattattattttattttactttcagttctgggatgcatgtgcagaatgtgcaggtttgttacataggtatgcatgtgccaaggtggtttgctgcacctaccaacccatcgtctaggttgtaagccccgtatgccttaggtatttgtcctaatgctctcccttcccttgtcccccaccccccaacaggcccctgtgtgtgatattcccctccctgtgtccatgtgttctcattgttcacctcccacttatgagtgagaacatgtggtgtttggttttctgttgctgtgttagtttgctgagaatgatggcttccagcttcatgcatgttcctgcaaaggacatgaactcattcttttttaataaaaatatttttaagtaaaaaagagaatcacttggtcctggcccacacccctgacagtctgattcaggtagtccgaggtggggcctgagaattttcatttctaacaagctcccaggtgaccctgatgaaggcagcccgaggaccccacttagagcggaacttcatgagatcgtgcctattctggattcaaagagaaagactagcagcttgaattttctctctgtaaacatttcttgaattttccttaatttttagaaccctcaataattaggggtgaaactgatttaatctgctcattccttttttgaggcaagaactagttcatcaaaatgtaataaaaaatgtccaaaaatcttttaagagttttgatttgtaatctttcccttgtagaaataagagaaattaagttaaatggctgaagactgtgttttgtttaagaatgaaaaacctcagacaagtccattggcatcaaatttggcaaaaatgtattaaaatgtatttctctgttgtcaagcattttctctggatttctttctttccttttttcttttcttttcttttctttttttttgagatagagtctcactttcactctgtcgcccaggatggagtgcaatggcacaatctcagctcactgcaacctccgcctcttgggttcaagcgattctcctgtctcagcctcccgagtagctagaaatacaggcacctgccaccacacccagctaatttttgtattttagtagagacagggaggtttaccatgttggccaggctagtctcaaactcctgacctcaattgatctgcctgcctcaccctcctaaagtgctgggattataggagtgaaccaccatgcctagcccattttctctggatttcttaaccagagtttggtgtaggaaagttgatactgtcagtaacatcctagagaagcagaaacttcccaagcttgggattgggctctggaatcacttataacaatcttggttctggggaaaagctatagttgtccatataacccagccttgtactccctgggaacctcgagtgttacaggcatcttcaggtgagggaggaagtggccacatgagcacatggccctgtccactctggcttagtcccctaggaatcacccactgtgcccaggctgcagttacccaccttgttcatctccaaggcccttaccttattcaagcagctggctgttttggtctacatatggtaagcggcccaatgactgatattgccagctatagaggttgggtcgacactgcctcagaaatgctttagagatacctcacacacatctttgagccttacaagaccattagatgtggccagtggcctcagagcactgacagagtgatcacacacacacacacacacacgcacaattcacaaggcatctccaatgcccaaccaccaaatctattgtggtaggtcgaatgtggtctgagctgcaaggcagaatagctgttgttggaagaggcggaggcagtatggaaggcaccccgggtctcagggttgttaaagactagatctcaagtttattcattccagtttgactcttcctttcatagcattttccagctgtttgacagaatgaatcaaagcgaggccttttggtatttggcccatggcagagataagtttgaagcttgttgagtttcagtgggtaaacccggacttccagattcaaaagagacttgcattttccaggcatcaaagcgtccctcagtgctcactgcagatacaaatgctttccagcaattcctgcagaggggcaggtggtaggactcattttgtttccaagagcccaagataagcacatgagcacttacggaacatgtctcagggctgggagcatgggctacattgggtgtggccaggagactagtttcaggagacctcttcccaggaagtcttctaggacatcccactatttgggatccctgctctttgtttccataagcccctatagcctgcacttaggctatttcctctactagaacataagcttaaagacaaggtctgagtcttaaccctctgtccccaaaataaagtctaacatagtgagcacataataaccttcattgataaatgtgtggctctggatgaatgggcggagtctggccttctctgccagtagtcagtcattcaggttctgagtgcccagtactatagcaagggaccaaggaaagagagggcccccgatgggctgatcaatgggaacaagtctccattcatagaaattgggccctgggtcctcagggccaggctcaagcactgtggatgaggccttgaccagacctgctctgaggcaaggctgggccctgtcatagaaccatggcatcaggtcagagggtggatctatacctgctcacagccattgaatctgtaaatcaggatcctgccctgactgtggggaggtgagaggaggctgggggtctcacagagacacacggtggcatgtggagagagccctggcgctgttttcacagcactgtgtgatcttgggcaagtcccatgctcactctgtgccttagtctcttcattcagctatgtttgcagctatggttaaatcaaaggttgtttgtaatgcttgtgtaaaattatctctatgaagatgcccaaaacatatgcgtgcatctgcaatgacgggtcttctgccctctgactcctggaggtcttcagggaatacctcatctcatttctcttgcagatgccatctttccccactgttagataactcctgctgtcactttcccttggacagggtcactcctgtggaggccgttcctatcaccatccataggtcctctcagtgtcctctgtgtcttccatgggccctctcttatgcccctgatgccagctttacccaatctgtctgctgctatggtagggtgccccatggacaccatcttccacagagaccctctcatttttccctgcagggttcaagggcgaaaaggaccactggcggagccgacgcaccatctgtgtcaaaacccacgagagtggcaggagggagattgagatgtttgattcagccatcctgctaatccggaacccatacaggtccctggtggcagaattcaacagaaaatgtgccgggcacctgggatatgcagctgaccgcaactggaagagcaaaggtaatcaaggaccttgcggtgggggtgggaggcttgtcagtacaggtaggttgctcatcaggatgcaggatcaatttacacaggtaggcactgcaggatgcaggatcagtatacacaggtaggcactcaaaccccatcctgctagggacttagtgctgctgtgcctgggcttgagttcacctcctccccttgccccccatgcctgctgaggtccatacgccaaggcattttacttagatgccagcttgattaccaagaatcttctctgcctccatgagtgcatagtggggtgatatgcacccctttccatctctgcttctgcccaggagctcatgcagggctgggagaagagcacatggggtgcacatggacctgctttgcaccttcctctgtgttcagcaccaggttcctcttttatagaatgagacctgcaccttgtggggcattcagggagcagtgagatgatgtgcctgcctggtctctggtcagagctcagcatgttaattccctcctaagctgcctcttgctgactcttcacagtgtctggtggggaaatcacatcagccctacattccagatgagcccagagaacatggctgcaggacttggccttggtggtgagcagcagagctgggactcacacccaatgtcttagtcagctctggctgccataacaaaataccacaaaactgggggatggggcagggggtggtgcttaagcagcagacatttatttctcatagtcttagaggctgggaagtccaagatcaaagtgctggctaattccattcccaggaagggcctgttttcaggcttggagacagctgccttctcactgtgtcctcacatgtccccaacagctctctggtgactcttctgataaaggcactaattccatcacaagggccccaccctcatgaccatatctgactctaatcgcctcccaaatcccccatccctaataccatgatatggtgggttaggactctctgtgaatttggggggcatacaagcatctgggccccaacatccagagtgtctgattctgggtcagattggcctgttccccactgcagctttattcatggaatcagtcttctgactcacacttgctgaagtcttcctgggtgccaggcatggggcaaggtaccaggagcgcaggctgatgaggtcagggtctctgccctcgaggcatgcacagctgagcctttgggtggtgacgaatagagtctgggtggtaagtgatgtgaaatgaagttggtcagaaacaaagcagtgtccaggcagggtggggtgagagaagtcacaggacccatggccagaccagcttgtgctcctgtccacttgttactggatcacccagtgggtggcctctgccggcctctagtcttccccttcccccatcatcctttacttagacagcccccgacagtcaggcaggctgatctctgacgcctcctctgcctcttatgagccgtataactccgggaaagctgcttatcttgtcttctgagcctgttttctcacattaaaaacaaggataggccctgtctcctagggtcattgtgaagattagagaaagcaaacgcttcagacggcgtttgaggtgtgttaatagcccaataatggaaactttttattgggatgatttctgatatctggaccctgcacacccctcccccaaaattaatttcttaatttgctggaaaagaaagctcataaagtagattacctgcaaaagtccgaggccaccccgtctgtggcttcactgtatgtcctactgccctgcagtttcacaggttcaaactggcaatcaaaccacaagatgcgtatttgcccatcaggcatcacgctgacttagctttataggaggacctgggatgggaaatggaggctgcacagcgtcctcatcccaccaggatgcccagagctgcccccacccaccacggacacactgctcagccaccaaagggtcctcctccatggggaatgccaggttgactctaggcagtggacagtggaaaaccctgcccacttccctctcccgagcagccccccggggaccggcagccctggcagggccagcccccgactctgcatctctcctgtcctcactctagagtggccggactttgtcaacagctacgcctcgtggtggtcctcgcacgtcctggactggctcaagtacgggaagcggctgctggtggtgcactacgaggagctgcggcgcagcctggtgcccacgttacgggagatggtggccttcctcaacgtgtctgtgagcgaggagcggctgctctgcgtggagaacaacaaggagggcagcttccggcggcgcggccggcgctcccacgaccctgagcccttcaccccggagatgaaagacttgatcaatggctacatccggacggtggaccaagccctgcgtgaccacaactggacggggctgcccagggagtatgtgcccagatgataggcctggcccacgccgccgcccccgctgagtgacgcaatcgcaccacggggctgcgctccccactctgatgctcaggcccgtggcctcactgggacgaacggtgggtggggggctcaccctggtgctgcctcccgcacaaggagacctggacacaacagacacacatcacaaggcgaacacaaatggacacacatacctggccacgaacccacacctcctcagacactcagacaccactccaggctcatagccccgtcttgatgcagagaagccacccacgtggggtgtgccaggcacccccagatacaaatgcagccacgcacagacgtaacacacaggtgccaggccgtgtgctcctggaggctggctggctgtctctctcacacagatacacgtgcgctccctgggatccgggaggccctgggcttcctgtgtgtagccctggcatagacttgctcgtcagggtgttcgactctgggatgctgggccgggcagacatttatgctctgagcagcaaggaccattgggatggaggtgggcacaaagactgctgcttccagggtgtgcggccctggccgtgtgtctgacatcccataaatgtgtgtgtggtgtgactacgggcaccacaaactccgcagccttgcctctcttttctctgtggctgggctggctgcaccatgggcagggttgaggactgccccccaccccgcccaagccaatgcagacactgacctcaagaccagccacaccaagtctgtgcactgcccaccacccccttcaacccctcctacaccatgctccggggcctggggcctccttgcctggcttcttcctccagctatcctcagggaagctggagattcaagtcatgccccagaagcaaggtgtaagcatgggggcgtggggaagagggcaggagctgaagttccaggggagcccaggacccctggggacctgtacactagcaggatgggtcttgggagttggcatggggagattgtaagggctgtatctccgcgattactggtactggtgctccacccataggggccctgttctctctggggtcccacactggggtcatgagagctagttagtactcagcctgacccctaggtctggtcctgccagcctgggatgggggtcaatgtatgctacacatcttgggctcacaagtgaggctgtggaggccaggaggttcaagtatggagggtaggagtgcaacccaggagcaacgctcaaggtggccgagatgcagggaggattgtggcgatccggttgcacactggcctctgtggaggtcagggaggtgggaaggtgggtgggcctgaactcaggcagcccttcagtggcttcttcaggcctaggataaccctggccaggccccatggtcctgctctgggtcagctgtcagggagacctcccttcagcctgagccaagctgcattgggaggagaaggcagggtgagggatctgggagagcaggacgttgagatatcctgaccctctgcttcctagcctgatgatggggaacccagagccacccgctatgagcacaggccgggggtggaaggcccagtagagctgcccttccccagatggaagcttcctccaaccttcagtttggccagtgggtgggtttgggcatctgtgcccctggtggcctccaaatccttcctgggattcccccaaacccacactgatgcgaagctgttcttgaccctcccatagcatcaactcagttcagctcaaagctagaaacaccaaggtctttgaaaatgtttattggctcaggatagcttcggcatccaatctgcgaaggcccctgatggagctatttcttcctagtatcaggagcaattgagacccctcaggagtttccacactgctgtggacgggatagccagggcagacctgcatcccagagcaagcctagatccttgaaagcaatgtcaggcgtggcagtggggaagccatggaggctgggaagggcaaagtgtggagagaggagtgaccgggactggagccagggtctggggagagcaacagcaccaggcttttcctggtagttggattggtacattcactgctgccaggtacccagagatgtcatctctctccaggtagagcatcaccagctcctgtggccttgtagatgactctgtacctcagtgaagagtgcaggcaagtagagtgatggggtcagtgtccatccagtttacgctgagtcagtccatacagcaagacacctggcacttggcaggtactcctggatgttgatgagcaaggaagagcaacggccctgtcagctggcagtggtcctcacagccttcatcccaggtctgcctacgtgggagatctcatcagaaacaggaacggggatctgtctgtgcttgcaggaaagtccatttgtttttctccaagttaggtctcatctacagctcttagcttctcagtaaagaggatactctcccaaccagccaaggaataaaagctgatctgtatgtagggcagaagtgtggcaaatgcatcaggaaccggttagaacagaacagagaaaccctgactgtctacagattccaactttaatagcaagcctgtggagttacacaaacctgtgttaaaacatgtaatttttatggatttcatctcccgttgtggatcaatttggaaaaaccaaaatatgtaattttaaaaaactaaaacacatcctggtagtcccagtgatgtgtaaatgagagagaagaatagacaggcttccaaaccctgggaagaaagctgcttaattatgtgaacatcttataatgaagtctcttgcagctaaaattagattttgagtgcatgaatctgtgataatgtttgcatatcagaatgcattctccccttaaaagtagcagtagccacttggttcttagggggccccaagaggagaggagaagtgctgaggttgatgttacgactgcaagaattcttgggacacaggtttgttttctgctgacttgctcggaaacccattggaggtatctgaaatgtgatgactccaaaggggttcatttcactatagggagaaattgattcgtctgacttcctatttatcaccactcaatattgggtgagttggtctgaacaaggtggggataaagtagagtggaaataatgtagagtcgtcagactgaaaggccaggttgtagtcccagctcttatctgccatcttggacaaagcttttcccatctccagtctcagtttcccatccataaaatgggggaagtggtaggtcttgctgattgcatccacattcattcctccatttcctttcccagcaaccccccatttctgtttgggaattcatatgatctgccagagcctctccaggggtggaatacatgtcctggactaagccaatgacaccttccatctttccagctatggtgactgggttaggtatgatcttgtgagttaagacaatgaagccagagggaatttcaagacttatgggaatgctgggtagaagctgttttaattcccctgttgaatgtgaaaaaggtagtagtattcctgggtctttatgatgaccaccttgggccttgggatcatgaccaggaatcacgtgaagctgacaccactgaagggagagttgagaggcagaaagagatcaagtccttggtgaaattgtttaagtacaggatcaagccttgcttgagattggccttacctctggactttttttgttatatgagctaataaattctgtttattgtttaagttgggttgagtttaatttctgttacttataactcagaacatggtgcaaatgggttgaattgaaaagccctggggctctgacattctctatctctgtggctgatttagataaagcctgaaactcagtccaacttgagcttgtaggattgggaggttacttttcacaggaattgagctgagtgcaaatgctcaatagaaagctgtgcttagccaagacaagtagcatttttaagttggtacatggtgaggtcacccatatagccatagacaataattcataaggtgcccagcccaaaccattagttgtctcatttaatgtttaaccctttggtgtggttattatttattatctctgcttgaaaaatgagaggactgggattccaatttgtaatgactgtcaaagtatggcccttttgtagttactgtaacttctttcatggagtatatgatgtggtattggaaggaaattatttgataaattacttggattggggataagacctctttagccccttcaggggacatgcttgtgtaacagcttatagacagtaaactcccttctagggagggtaggtgtggttaaccatatagcattgattttgcaaagtgggacatgcaagcttggggcagagctgaattgctgctgttggaggggaggtgaatgatgccactgtgagtttccccctctgtctttccctctttagctctctatatgccagaaatcagaggaacagagggagttatatgtggctccccatcttcatactctccttggaatgtctattatacagtatgccaggatgaaaatctatacaatatgtagaaaaaggccaggatcccaggaaatttatttgagtatatttgtctgcagtgctcccttttgtgactgaagatagattttgaacttctggaagttctcaggaggggcccaaatgtgcagacacactgcagacatccaggtccctgccatgggaaatatgagcagatccagcttaaatgaggcaatataaaatgaggaatcttgatgtcaaaaataaaaagaatcccagttgatattataagcacaaccatgagctgaatgcattaactttccaaggtgtctttagtacttaagaatttttctcaggttcaggcatcagcagtgacagatccatggtttgaaggtgtgaataatgatgatcaataacagtgaacaaaattcttttgggtcacaaagttccacaaacatcatcccatatgtgcctcagtgaggtgaacattattatttccatgtggagggaataggatatgtggtttcggagactgagttagccaaaatttcacagctttagtttatagaagagcaaaatgagatttggaatggggagaggtctcatacaaagtcatgctgtgggaatgagtggtggagctgggaccagaaggtggattcattccactaaaccacctggttggccccacattgcatacctataattcttcaagaagttgctggaaatgggacaagtgtgcacagacagctcatttggaagcaagtccatgaatttcactgctcattctttgccagaatacattttggtgggcaactgagttttaagagctttttatcaagcatccccactacttgacaacctgctcagaagaaaaatccctttccaaagaagggaagtcagtgagatggaccataatgccgtaagctaggagcccagagttttcatcccaagtcaccaaatcccagacaaagaaaggtcccgttattccaagacattaattaataggcaaggatctttggtgggtcccagcagtatgtatgtatttgtaagagctccagttgcagacagctgcccctctgaatccaatgccagccatcctgagcattacaagtgacaagagcctggtcacttggactttggcatcaactcacttagataattctttctcccacagtcagatctatggtacccagatgacagaataatctaccctcactttggaaggcagggcacacatttagtatgtgtctaggaggaagcccagggaagcagaatagtggtgctaatacagatactttctaagccttcaaccatccagttgtaccatggcacttgccgaaggttgaaatcatccctcaccagaatcacctgtatttgttttctattgctgagcaacaaatgaccacaaacagaacagcttaaaacaacatgcatttatcattccacagtttctgtgggtctggaggctgagcatggttaactgggttctctgcttcaggatctcatcaggctgcaatcaagatgtcagccagactgcgttttcatctggagatttgaccaggaataatccaaacttacttagatcgttgacagaatcaagttgcatgtggttgtaggacagaggccctgagctcctagatgccatccactgttccttgacatgtgggtatctccatgttcaccacatggctgttggcttcttcaaggcccagagagtgagacagtctaacattcataatgtaactacaggagtgacatcccttcatctttgccacattctactggttagaagtgagtcacaggccctagtcacatccaaggggaggggattgcacaaaggcatgaacaccaggagatggggatcatttgtacaccacaacaccaataaggaaaaagtccagcaatcagagcatgctttgtggtccatagagaagcactggccattggatcatattgcatgtagtggatattttgaagcatcatccaagaggatcggtgatatccaagtcataataatgaattcagagctaatgtcctcaacccactgccttgacagcagcagaatcatctacttgtgaagctaaaggaatattcccaatttatattggccagacctgtattatttttaaaaatttattctgctcggcacatagtgcaactttcaatttctttctttttcttttcttttctttctttcttcctttcttttctttctttccttccttccttccctccctccctctctctcgctctctcttctctttttctttccctcctttctttctttctttctttctttctttctttctttctctctctctctctttctctctctctctttctttctttctctccttccttccttccttccttctctctctctctctctctttttttggatggagtttcgctgtgttgccaagctggagtgcagtggagtgatctcggctcactgcaacctccgccccccaggttcaagcaactctcctgcctcagccttgtagctgggactacaggcgcctgccaccatgcccagctaatttttgtatttttagtagagatggggttttcaccatgttggccaggatggtcttgatctcttgaccttgtgatccacgcacctcagcctctcaaagtgctgggattacactggatttctttctttaattttagtacatattagctactatctctttgaatattgccatctctttttgttaatctctcattctggcactggtgttggaactcaaaaatccggtttccacactcagctctttttctatactttttatctctcaatcccattgtactgggtcctgccataattctttactttaatagtcaaaatttataatttgcacatcactgtgcacattctgctcgtcaacgcatctatggatttctatatttatgttttttattcatgagacttctagttgatttttataacaatctggacatgctttatggccatgatactcttttgcctccctctgaagatattaaatatatttatgtaaatgttctgtcgtgtttgccctatcaactctattttcttgggttttaggttttttcatttcttgattttgctatatttttcctggtttggatttttatcaaaattttagtgattgtgtgttcatgaaaatagaggggaattgtggaggtgtcaaccatcctgccttctgccttaggtatgacgccttaataatgactctgttaattacccctaggccacctcttgctcccaaattccacccactctcagtaggaagcaccagtatttctgaggcagaattcccagctaggtcctggactgtgggttccttctaagcttcccgtctactttctatctttcagctcagttttgggtccagtctagtgcctcttcttattttcaagcgtggctatgttattgtataccttgattcagggaacaaagtaagtgcttgctgaacctaccatcatgtaagcaaggtccttgatgcttaatccatcaccaggaaaaccaggttgttagtcatgaaaaccagatctttgatgctctcttgtgacctaagagcacataaaaatgctggcttggagtgagaaggccaaggttctaatctagaaggacaatttatgtgctgtgtgatcttgggcaagtgtcttgcctctctgaatcttaaaaattagaagtttgaaataagaattggctcagtcctcacctagcttgggctttctaaagttctgcttatcacatccacaacataatccaatggaatgatttttgtaccagctcaaaacatagacttcaacaaatgatatcatgacagactttcacttcacaagaattggcttctcaatctttgtcaggtctcctccgcaaaatggatagtgccctgggaaaaataaaataccctaaaaataatttttatttattccttccattctttgttttctgtgtttgattccataaacaattctccaatgatttttactcacttgaaaagctatatatatatatatttttttttgagatggaatcttgctccgttgcccaggctggaatacagtggtgcaatctcagctcactgcaagctctgcctcccaggttcatgccattctcctgccttagcctcctcagtagctggaattacaggcacctgccatcacgcctggctaatttttgtatttttagtagagatgggatttccccat[133 bp omitted]tttaagccagtagaggcagggatagtattgtattttgcatttatatttgtaaccttagctcctagcacaggtcctggtatacaggaggcacaagaaatgttaatgaaatagaaggacggatagattaaaattctaaatcacctggcttttaaagttttccaagaaaataatatcttcctggaaaatagtacctttctcttccaattacaagctgaggatatgttgctgaggatatttggttgagtttttccaccagctgtttattgagaagctcaggaactgagctgtgctataatcgttccgtgctgcagatgtaaaaggcaaagaaatgtggcagccaccaaattttgctggagaattgttctcagctggcacagttcttgatcaaccacttgttcccaactcttgaggaacaggaaacaagttgttaggatacctgtcaaaatctctgttcatggatgttcagaacgatagtttaatggcacaatccacacctttgctccaactcagagtctccactgcagatgggcactgttcttttttgcctcgaggtagatgggaagcagcatcttctctgcctcttctggttctgtagctcattacctaaagctcattaaacctatagcaaaactttttttcttttaatattaaccacccatctatcgtaggccctgaggtaggacacaaagaccccacttccagctaggttcaggaagaaacttcctctccctgttatagggcaagggcgagaatgcagagacacagcaaggagggtctgcctactggtcaacctgaggcctcccaccccagtattatcataaagtctaaagctccttgtgttagttacccgctgccatgtaacgaactaccccagaacttagccacagcttaaacccgacttaaaacaaacatttgttaactcagggtttctgcgggtcaggaatctaggcatagcttagctcagtgactctcatgaggctgtaaccgagaagttggacttggctgcagtctcagctgaaggctcactttgggaagaactcacttccaagctcactcaggtagaataatggcaagattccatttcttgcaggctgtcagactgcggacctcttgctggctgttggtcagaggccaccctcagttccctgccacctgggcctctccacagggcacctcacaacacagtggctggcttcaccactgtgagcaagtgagaagagccagagagagtgcaagcaaggcaggagtcacagtctttttttttttttttctggtaactgaaccttggaagtgacatcacatcacttttatcatattgtatttgttagaagcgcatcactaggtccagcccacatgcaggtgaggggattacacaagggcatgaatcctgggaggcaggaaacctgtggagcgattttcatggctgcctactatattcccatggagggccttctacactagagtcacagccatcattgttgccacacacacttacccttgcccctgcacatactacattgcagacttcagcatactcagcaaagtctttccaggcctgtaggctggctggccttctgcctacatcattattgtggcagagagatcacttcctacgctttctttccttataactgtgctcatcccttctttatgccaaggagaatgctcctggtccccacattcagcctggtagggaaaaagcaaagcaggaaaactccacccaggcctcccatcggggtgcccccctctatgggtccatccaccaaacctgctcttagcacaatccattctccccggttacacccagacttcccctgttccgtggccacattaacctccatcagataattaagggcttggctttccatgagagaccttaaatgtcacctttctgccacccgatatgtctctgaatgacagactctaatgagatattcaaatatagaaaactgaacgactctttgctttctcatcgtggcatttattcagctggagtgatctgactacaccactacattacttataatttctacctgatcttggtggtggagtgtaatctttaaggaaactatccgtttaatctctcttgccttattagcatttaattactatgacaaatttccagacgtacaagggatgttaggattataattcaattttcccctcaaatggcccagtaaccaagggcagtggagccatttctggcactgtcaagttctgatcaaggaagttgcctggacctggtgcaggctcctgcctgtctgagtgctgagcagggcttatcccaacctcagctccccagctaatggcagagccttctgccagccaggacccctcactcgttctcattctctctctctctctctgtctctctttcagtgggctgagcctttttaccctgctcagggtcaggccgaggcctgaggccaagaagagggtgttttatacacaggaagggagcaaattctcagctctgagagctgcattggccagtggacgccataagccaactgttctatgcagattttcagtcattgaaggacagcagatggaaataagccagagccaccttcaactactttcactcgtttaaaaagccacattctgctctgtgtcactgctatttttctgggtcccattttgacacctcttgcttctctgaatcccataaatcactgagaaagtccttcttagggtcaccagtccttcgatgtggagaatgaagcaattccaaagggaccctgcctggggtctggggaactcgggctctacaactgaccctacctctaactggccatgcatctttggaagactcttatcattttccctgagaactatcactcaaacagggcagtagagctgacatctgggtttgacttcatgaccttgtctccttggccagagctcacgggactgctggggcccctgaccagagctgggcaattggattctccttttggtcacttgggcttgggcctgggagacccctgtctgtctgctagctgcgcaaaatgaagacacaggaatgtggggcccatggagcatagatgtgggcacgcagacgatcgctgcaaagagaccaatgaatggcatcattgtgctgagagatggagatctgagaagaaaataacccagagagaggctgaaataggatctgttcaagtgaatattaaaatggtaaccaatacccaagacaaaaattgtgcacctaatcaaatcagttctttcatttgtctgcattgccttcttctcccttttcctgctaattttttacctgtatgaatgcatgatgtaatagatagaaccttttcttttttatttaacattatatcatgaatatttttccatttttctgtagtcttttttttttttttttttttttgaggcagggtcttgctttgccacccaggctggagtgcagtggtgcgatcttggctcgctgcaacctccaccttctgggctcaggtgatcctctttctcagcctcccgactagctgggactgcaggcgtgtgccaacactcccagctaatttttttttttgagatggaatcttgctttgtcgcccaggctggagtgcagtggccggatcttggctcattgcaacctccgcctcccaggttcaagtgattctcttgcttcggtctcccaagtagctgggattataggcatggactgccatgcccagctaattttcatatttttagtagagatggggtttca[141 bp omitted]tagtctcaaactcctgacctcaactgatcctcccacctcagcctcccaaagtgctggtgttacaggtgtgagccactgtgcccggcctatagtttttgtatcttatttttccccaattcttctccttttcctactttcccgttcagccccctgatatagtaaccagtgacagcctggtagtatccattcacaccattatcacaccattcacatataaatatataaaagcgtatgtgtatatatctatatttctgtctgtgtctatatgtctatagatatagatataaaaatttgggggccatcatttgtttttgcaaaaatgtaataaaatgatttttctgtgttttctattcaatttgcccttaaatgatgcaaaacgttcattcctttgaaggcaaatctaatattctctagttgggaatctccagaatgaggtgtatacactgtaccggcacaaggaaaacatatgaaaaattttatctctatttattttgatctcttctctttaaaatttctattttctgtttgtttatcctacacttaaggtattcacacatgcaaataaatatccatcttttggaagtgcatgctatcatcaaatgagcaatcagaaatgcttagagaccactagtctacagaatcagggaacaacttattcacacatttcccttttgatggatatccaggctgttcttagacgctgcagcaggtaccactacaaactatgctttgacaagcattactctacacagatat[138 bp omitted]gcctaggcctcctgagtagctgggattacaggcacccgccagcatgcctggctaatttctgtatttttagtagagacggggtttcaccatatcaggctggtctcgaactcctggcctcgtgatctgtctgccttggcctcccaaagtgctgggattgcagacatgagccaccatgtccggccgtgctttttgttctataggacagattcccagaagtacaattcctgattcaaagggtttgtctagttttaattttaactgatatgggtggtctgctctccacattgtctgtagcaattcatgtccccgccaccagcaatgtatgaaacacttatttcctgcatctgtaaagattttaagagttattactcttttcaacttttgccaatctgatcagaggggtgagaaatggcgttcaggccaccttcatgtataagcaaaggcatcggatcagacaacctctaggattgttctagctcaagtgtccatatttctcaaattattttttttcataacttatctgttagcaggtgtgtgcttagcccccattcactgactgtttgcaaatcccagagacatctttgaaaaaattgccagaaaccaacacatcaagaactggaaagaaagaaagttgaatagagtccagaaaatcatcttgccaatactgtttagcttgtaaaaaccatctaagccaaatccctgcgatttcatccagaacaaataataaaaaagcagtgtgtaatatttctaagatgagcatattcatagtaaatattttaagatccatggctgcacaaaatgcattttccttggaggttcacttttcaaatggcttcgtattaaaagtgccatttcaacaaatattcatggggaaattcatcgatgtgttttaccatttatagctaaaatttcaaaggacttaggaaaaaaaggtatgatgcatatcctaccctcttcggagaagtggtgaaaaatacgtgctatgctttggttttctctgactgtaaaactcccaggcaagtatctacacttttcattcccactcttctctggctattcctggggtggatggcagcctggtcagaggacaatcagcaaggactaagggaggaaggggaagtgagaggttaggaaagcctaggcgccaagcctctccaaagtctccggagctcttccaacagctaccatctggtgagcatttaatgcacacacagcagcttgacagaaacactctatattctctcactgcaacctcactatcaccctgtgaagtagttattattattattgagatggagtttcgctcttgtaatccaggctggagtgcaatggtacaatctcagctcactgcaacctccacctcccaggttcaagcgattctcctgcctcagcctcctgaatagctgggattacacgcaccccactaccatgcccagctacatttttttgtatgtttagtagagacagggtttcaccatgttggacaggctggtctcgaactcctgaactcaggtgatccacccgccttggcctaccaaagtgctgggattacaggcatgaaccaccgcgcctggccaatagttaccattattatcctgttttgcagataagaaaatggggcctcagaaaagtcaagcgatttgtccctgaggtcacacaactagttaacaggtagaaaggggatgcagactcaggactatctagctccaacttgctatattattagtccctctgtgcctcagtttcccttctatagcttccccagatctcaaggagcccactggggctgtagagatcgaaggaagtttggtatatggtgctaaatgctttcttcatctccccggccgcttggtctccggtaagcacgatttggctgcctgctctggacatgaggcatcccacggcccctgtgacatcatccttcttggcccctttgcctccggcaggaagcaaacccccacagacaaagaattgaaaatctggtcacttattccagccaatatttctcagtcttaggtaggcatattcatttttataatggcaagttttaccctcggtaatgatcagatccaatccttctcttgtttgagttgctgaaaccactcaccatggcccaggagaataaaacccacaggctccacttggcttggcactcaaagccctctgcaacctgcccacataaccatcattttgcatggatgcagtcttgcattgatgcttcagccactccacatggtacctcttccacctgcctagtatgtctttcttccccttctctgactattcaaatcttaaatatcgttcaaggtccaacttgaatgaatctgcctcctccagggagcattctctgctctcccaggctgaatgaatgggcttctcctctggaatccccacagttccatttccaccattcggcttctaaccatcactggcattttttcatatctgcttttgcaactggcctgtgagctcctgtggggcagtggcaatgttatttacatctgtttctacagcaccaactcattatttggctcaaagtaataatgacaggccaggtgcagtggctcacacctgtaatcccagcactttgggaggccaaggcaggcagatcgatcacttgaggtcagaagtttgtgaccagcctggccaacatggtgaaatcctgtctctactaaaaatacaaaaaaaattagccaggtgtggtggcacacacctgtaatcccagctacttgggagactgaagcaggagaattgcttgaatccgggcagtggaggttgcagtgagctgagatcgtgcttttgcaccccagagtgggcgacagagagagactccatctcaaaaaaaaaaaaaaaaaaaaaaaaaaaaaaggaatagtggcaatgacaacatcaatggtaatagggtaatagttgctatatttatgggggggttaaaacatgactttgtttaatcctcagacaatcttatgaggcaggtactatatttactcctatttaacaggtaaggaaaggggattcagagaggccacgtggaaatggtgaagctgggatttgagcccaggctgccttgttcctcaggtaaccactctgacccactggcttctaaaggtgctcagtaaatgtttgttgaattaaaaagcaaatgcattcatgaacaaatgagtaataaggaaaaaaaagtcaggcaacagagaaaaatcatccactccattgatgaaagcaaggcatttcctagaactcaagcaatgatagtgagcattctcttccatcatccaatcattgccctccccttgttggggaaatctcatgaacacatttcaccaatgggtgtcattccaaacctactcctgagggatatggaggagaatgtctcatcctttttagtccaggacaatgctttgactaacgttcaggaggacaggaccttagagctgtgcccaggccaacagggatgagtggcttgggctcattatactcccaacatgatcttcctgggacaaatattggttctaaggctgctgcccagtatcagagagctgtacaggctggaaatgtttggggagcagaagaaagccaggtgcaatgtaggaaacaggagaaagggcagatggtgagcaggccacgtccgtttggaggccaggctgcagctgcgggaaccacaggtgctggcagaactgaggttgctggtgcagaagggaggggccgcatcacctggggcttggccagggccaacatggagacagggacttggcccacctgcctgctggtggtcacctgtcttgctggtgctcagaaggagggggcaagccctggagctttccctgtcctccctcctctgcacttgccccacacagggagaattctggagataacacagatactcagtggcagctgagtcattcatgcacatatacatgtgcacagcacatataaacacactttcacacgtacatacgcacacatgcatacatgtacgtacacatgtgcaaacataaacatgcatacacatgcttctggtctcacacataaacacacacttatacacgtgtgaacacactttctcacacacgcacacaaacacatacgctcatatgtacacacattcacacatatactcaatcacacatgcacacacacccttttggtctcacacataaacgcatacacacacataccaggctcagaaaatttgtcaggcttccaagcacttcaaagcacaagtcaattgatggatcttgtttctggaaagaaatcagcatgtcctaaaggcctgggagctggattcttccttctgagatctgagagccgacattagctcctcaatctccatgtacatccttaatgggtttctggccttgtacacaataggaaagtgggctttggggccaggtgtcagtcaggggccagagaacagaattgcatggccaaaaggaacacaaagaaaggaaaaaggcctttcatgtggaggatttaatttccagttaggaagattgaaataattttatacagtggttttgaaaacacatgaaagagttttcctttctgaatttgagaggcagctctggagactgtcactgcctcctgggtgcccgagaatctggttctctttccagatttgctgtgaaccagtgcagtctctgccagaacctcaagggacagcatgccagacgttccattcaattcaactgagtccatccatccattcatccatccaactaaccattctttggacacccagccttcaacattcattcatttcaacacccagccttcatcattcattcatgtagttcagatctcctatcacctgctacgcacctgcctttggcctggccttggggtccaggtcccttgaaaggacttccagctgtcctcttgattatggaaaggatgggatgctggttacagggacttattcttttctaattcaaatgcaaaacagaggataaaccctctcaggtgtgaaactcccttggctccagaacaatgcagcagttagtcctgggcctggcccatgccaggttcccaggaaagccctgctgattcaggataactgctaccacctgtttcaatgcccttgaagctctccacactttttatctttgaaagtatttcatttaggtttcataatggaagcaaggctgaatgattatgtaacggtgctttctgcgacaagtttatgagtatattttgaaggcagcaaacgtatgcctattaagcatggggagaattatcagtgaatgtttttaaatgaccaataaaaatgaaattatcattgctcattgttttttatggatcataatgtgtttttctcttatggaaatatccaaaaactcccctcttagtcaccggccgctaattacatagttagcacacagtaatccatgtaagtgggttctcgcctgtcgtaattcgtcttcataaatgtaattggcccaatgaaacagaccacaaaataattctgcagagaggagatggattcaataaaaactgattttacttttctttttccaaaactacaaacttggaataggagtttttaagaacatataactgtttttccccagattgccactcctacctcaatttgtttgttattcaactatttattgatttattgaggacctgctctattcaaatcattggctcaatactggggttaagtcaaaacttgaaagaaattcccggctgcagggaactggccatcaagtgaggaagtctccaagcagcaggcagaaaccatggtgatgcaaggtgggtagtagtacatgctccagaagagatttggagaaagggctaaaggtgttcagaggcaaagtggttgcttcctcctggaaaatcaggaaaggcttcatggaagaagtggtatttgagctgaactttgaatgatgaaggaaggtggagctaaggcaacggaggtatgtttggttagattaacctgacagtgattatagtggagtgccggcaggtgaaaggtaaggggagatggagtggaaaggtaggtggatggttgttatagatggagaagcacattttatacttttcagctcaaagctgtgccccctcccctctgcatatgcaataaataaatatttattaatattaatattatatttaatatttatcaatagcaatattataaatattatataataatatattatattaataaatattatatgtaatattttatatgaattatacaaaattaaaaatatgtaaataagaataaaatatgtaaatattacataaatataaatatttacataaactataaaattattttatatatttttatgtaattttatattattttatattttaaattatatatattaaaaataatataaaattacataaatatataaaataatatatcaatgatatgaataatatgaaaatatataaatataaatatttgcattaatatataaatattatatatgtagaatattatatagagagactaatccaatataatatatattggatataactggacacaatcaatacagcatacctactgcttgccaggtcctgtgccggggctggctgggtaggagacttagatgatttaacacaaagcctaccctcagaaactcagaagggaggtggaaatgatgatgcggtcaatactggcttgagcctgtatctccatttattattgtgagatggggcggtggggagtgtcactgttcaaatgggagtgtcactcttcaaatatggcagtttgtcccagacgagctcactctccatattccatattacagcaggcattgttagtgtgaggctctagttgcttccaaagcaaaatatttttggaccatttactgccaaacgcttcttttctctagctcagtcgccaacattttcctccttgaaaatttgaatgagcctcgaaaagacaccgagaagaaattcagggagataggaggaaaatgcaaataagaattacaagacagaattcaagaggattgggactttcagggaggacatgattgacagtgtcacaggctacagatgatcaaagtaagagaaggtcccgtaagcgtccattggatttagcctggaagaaatcactgatgaccgggtgagagccagggagcagaggtcagaaggcagtagggtgaggagggagctggcctggggtggctggagttgcataggtggtgcacggatctagtcaacctcctccacccacacctccgcttagcttgtgtggtctctcctctcatcagcagacctaatagcactcaggaaattatgtctttctgcatgattacagagtacattatgtgctactgtgacacttttgcattgcaggatgtttgtagtgccttgggatgactctactgtggtggctcttgccctttgtttcgtgggattaaaaccccgactcagtcacctagatgtagcacggattctcccccttctgtctccacctccagctcctgcttatcatctcacttatccgtttcctcctctttacccctatggtttcttagtgatagactgaatttttgtttccaactcttcactactttgtaatagaattttacttgtacgccgtttccatggcctcatgatctatacagtatacttccccacttctttacttttgagttgaaaatacgacttgtttgggctgacaatatgacttgtttggttcaatgagatgttagtgaatgtgatgtaatcagaggcttgaaatgttctggtgcaattttttttttctttctgcactgcaatgacccaccgtgaaaagttcaggtgccaggtagatgctgccacctcagactgcaccccaaaagaaacatgtaaaatggacctgaagctatcctgtatcctagagccatgtccagtcaacctgtagcctgaagcaaagccacccagctgagaccagtctaggtcagccatactgtaatcagcctgcaaacccatgattatgaaaataaatactattttaagccactgaatttggggttggtttgttatgcagcattagcatgatatcagtactgatcctgactttgacctaagcactcatgcttgctagttcaaattctctactccattcctttaagcccatcttccagagagactgttagacaacctcaatcatcattataaacaaggaagactgccctttcaggatttttcaatatttcttccagaatgtttattccttcatttattcatttttttcaaacattcaacaaatgactacttgtactaagccttaggaagggcactcggggggaaaaatgggtaactataatttgaaacaagacacattccatctctttaagtgagtgcaaaagaagtgtgtgtaaataattacatcccaaggtgcctgctgtatttcttatcctaaagcaaaccaagtggaggtaaaatcatcattcttgaaaatgcccttgtttatacttaaaggcaattatctgtgggtatttaaaaataaaatctatagtaattacaagcttgcctttttctatttcacatatcacatgagccagtgaagaagcgggatgcaagacagtcttaccatatgtcaatatcaaatacgttttcttttaaagcgtgctttgcgcatccttctggaagatggggaatgaaatgctgtaaacaggcagaaatgattcacgggatcatgattgcttttcatcagctgcatcaattatacacagcaatgggacttggtgaaatacatttacaacttgttaaaaacactccttgaaacaattcagaccttgttaagtcctggtgtgctcagccaagcatagctgggctggccgtcagcagaacttagtctgagctgaacaagtccaagctgtctttggccaagaggaatggcatgccagggtggagattccttctgacctctccttccattgtcatgagatgtagctataggatgggttcagatttttgttaggctatcaataaagcatccaagcagccatcaagccaattaaccatactacgccagggaacaggggtacagggacagaagtaaaacaataaatacacggtcctgccctcaggttgcttacggtctcataaaaaataaagataaacatgccatccatctctagctcctccatctactatgtaatcttaaaaaaataagtacttaacttccctgtttctcaagtccgtcatccacaaaattacattaataataatagctacagcctaggactgttgtgagaattaaatacattaatacatgtcacggcagacacagctagttgcctacccaatatccatggattccactgggctggcaatgcaccctgggaaagtgctcaccttcctagactcccctgctgcgatggatggccacatgtctcagttctggtcaatgagaagtagatggaactggccaggcaccgtggctcactcctgtaattccagcattttgggagactgaggcgggcagatcacttgaggtcaggagttcgagaccagcctggccaacgtggtgaaaccctgtctctactaaaaatccaaaaaaaaaaaaaagaaaaaaaaattagctgggatcccagctacttgggaggctgaggcaggagaattgcttgaacccggaaggcagaggttgcagtgagccgaggtcacgccattgcattccagactgggtgacaagagcgaaactccatctcaaaaaaaaaaaaaaaaaaaagaagtagatggaactcttggttaaggcatcccttcctgaataaaagaacaaagcttcacttctttaaaatacttgccagaaaaaatataatggaagagccagccaacttcagaccatgagggagaaaccacatgcttgggatgatggagcaggaagctggaacgaacttggcttccaaatgacatccttgcgcacctgaataaactctgttctactgacttccagactccttgtcaggggaggaagagtttttgcttcagccactttcttgcttaagccactcttcggcagggggagtgagggtggttctgtactatgcagttgaacctattcccaactgacaataagtaaggtgcctggtattcagaaagaatttaataaatgccattggtaatgctgattttgtggccatgcagcgtgaatggggaaaacaaggaactgtcggaccacacaggagaggttatttatttattttatttatttatttttgagacggagtcttggtctgttgcccaggctggagtgcagtggcgtgatcttggctcaccacaaactctgcctcccgggttcaagcgattctcctgcctcagcctcccgagtagctgggactacaggtgcacaccaccatgtctggctaatttttgtgtttttagcagagacaggtttcactaagttggtcaggctggtctcgaactccggacctcgcgatctgcccacctcggcctcccaaagtgttgggattacaggcatgagccaccgtgcctggccggagaggttctaatccataccagatggaaacttcttggagaaagagacatccaagcagagacctggaaggtcgggtggggatgctgccaattctaattgttggcattgttccctcttttttttttccacggttctctcattccatggaacctctacctgggatggctcaacaggctctgagcagaccttctacctgcagtctagcccagaccatcttccattcttgtttccagggaaatcttcctaaaacagacctgatcttatcacactcccagatgaaaacctcctgagagagatccctcacctacacagaggttctcaatgtttccatcaaagggccataagcgacaaacctgtacctccaaggaagctgtggcaaggcctgaaaatgtatttgaacttctctaattcaattccaaaaaatgatgtcatgttttgtgtttattttgtaatatattcttgctggttttaatatgaaacagttttaacgtcctaatgggcttaactcatgttctaggaagacatgccacattgagccagtggttctgaatacacccttgcatactgctctatacatgagagagacacaggactccccaagcaggcatcaggatggcacttacttagcatctcatgatactttcttgcctttctacatgccagcccttcctcactgaatatcctccttccctggctgtctggccaactcctgggtatgctttcatgttgcggcacccaccatgtcctagtttgagcagtggttaaagagttttcaatctctgattaaattgtgaatcttctgagggcaaaggctaaatctgattcatgactgaaagttttccatttactgttgtataataaattacccccaaacctacagactttaaaaaacaattattt[138 bp omitted]acggtgaaaccctgtctctactagacacaaaaaattagctgggtgtggtggcgcatgcctgtaatccaagctacttgggaggctgaggcaggggaattgcttgaacctgggaggcagaggttgcagtgagctgagattgtgccattgcactccagcctgggcaacaagagcaaaactccatctcaaaaaaaaaaaaaaaaaaagaagaattcagaaagggctcagctgagcattgtcccatacagtttgcagtcacacatcagctggggctgcagtcatctgaaggcccgactgggctggaaagtcccagatagctcctgcctatggcggcaggcagtgagtgctcgctgtcaccagggggctcaggagatgctgttcattggagcatctctgagcagcctctctagtcagatttcctaaggtagctggcagagcacgtgtccagagcaagtgttaaaagagaaccaggtgaaagctgcatggtcttctcagatccagcctcaggagccatgcagtgttatatccaaccatatcctattgatggcaaatgaatcaaaggccaacacagaatcaaggagtggggaggaatagactccacctcttgatggggtcacatgacagaagagcaggtgggatggaagctattgttgcaattctctttggaaaatactttctgccatagtaagcagctcagcctttagctcagtgtatggagaatgaatgagatcaagtgttctgagggctgccaccattcccagaataagattttcacatggaagggaaatgaaatcactctctctcctttccaaaactttcttcttctttaggactctctctgcctctccctaccctctctcattgaggccaagagatgagaaagagtaagagagggattgatggaagaaggattagaagatttccaactcttgagaaggagataaataaattcctctaccttgatatttcccactaccaccaagcttcagtttttcttttctaccccaaattaggaaatgaagtcgttggtatttgttttgagcacagatgaatggccagtaaaagaaatgcaaatcaagcttggtattccatctttccccactggaaccatttatgtcccccatttcctcggggcctcagcctgcccatctccattagaacatagaggacttttggctagcccatcccttagagagtctcctgcaattaaattctataatttcataccagccacccccagccaacctagtacagcctctcctggggagacgcagcctgtcgttcagagaactctccttctccaaaatctaatttcccctcatttcccattatgagttcagttatgggagccttcatagcaggtgtcattaaatagacattaagacccaacaaggcatgttttacaggaccattaccacatgcctgacgtttgctgtgacaaatggagatccagccaaccacgccatgtgataatgggcctggaaacaccccctgcggtgaggtaatgtgattagaagatgaggctgtcattgtttaatgccatccatcggaaggggactgactcctctttgctgactcgcctggaagtcaggcttcaccctcttcttcctgggtctatcaggctcctgagccaggagagaaggggaccactgtctggccagcatggcaagcttgatcatgttccaagaactttgcattgtgatgtaaggaccaagggctatgctgcctcagtttcccccaagatgataggtctctggcagccagaggcagaacagtaaaagtgagatgagcttatttatcattctgatcatctgagtaggaagtcagccctttccagcctcagagaactcaccttatttcccttcacatcattttagatacccagactcccaggtgaccaggcatcgctaaaatactcttttagctggagctctctgtgacctggaggcagcttgcatgaggagcaagcatgagtttgggttctgccttccttgggtgtgaatcccagctcagccgtttgatctcactaatactccttcccatcttcctcgcaaagatattataaggattacatgagatgacttacatgaaatatttagcacagggcctaatttagcaaatcctaaattagggttttcccaaccctccccatttctttttattctgggcttctagtccttggccttttaggaaggtaagggtctgggatctagcatctggttgatcctgcggctccctgaggactggagatactcaaagccaggcttgctcggtttatgacagttacaacctcagacactgcactttccagaatctccactgtctgcctcctctgaaacatacctcattgacaaaacagtgctgaggacagtcctcaaacctgcccacctgctgactgagcaagcctctcactcctcccactgagatgtccagctcccaaccagatgccctacttgaccccaaagcccttgattcttggataaacattcactcagtactgccccccacaaagtgtctagcctcccaatgtgtctagacccccaatgtgtctagaccctccactggccccctacacgtcctgccctcctgtctgctctgcagtctcttcccttgtttatcttcatgcttgctctagtccttgcccctggctgcttcccagcactcagatttcccctgtcctgaaggaatccttcctcaaccaactcccatccccctgccttcactgcctccacttcctctcacccaatttactcctccattcctcaaaatctcggttccacccccaccactgcacttaaattgctttctctatcttgctccaatatccaattagcagggtgaattgccttttctgtgctctcatccatccccacacttcagcaatggttgagagcaccaattgcccccagtgctttttgattctaggtcactaaggtctggtccttgccccacctctcttcatgggctgcctctgctccctgcaccagcttctcttcttccatatttctattctcatagcttctccctcccttctctaaactcccgcttactacatacacccattctcatggacttggccatcatttcaggctgctgacttctctatcctcttgccacccccagcctccttctctaactccaatctcatgttcccagcgacctgcagaaacaggtgtctcactgggatcccagagtctggatgtcccacatcccctttcttctcaaaaacctgctcctcctcctagaccgcatctccatgatgacaccaccagtgctttgctctgtttcccaaatgcttcctccctccctctcgccatgcccacttctaattcatggtccagaagccctctcaaaccacctcctccctggttcctctccttcccagcccatcccacctgatgggggaagatgccaagatggcctcttggtcttccattcctccgttcctcctctatattcttctacggaggcttccattgtaaacatctttcttctgtgctctgttctgagcccctccatgtggtgatggggcagagcagtcaccaccttccagggggatgaacctcatccattgccttgcctttgggcattttccaagtttgtccagcctcacctttccaaactcccctcagaccagaacccactgcagagacagagtattccagtgcctcccctcagcctcccagaaggtcctcccacctatcttgtcaacgctatcttgcctttcttgttctggaactttccgggtcttgccataccactcacccaggtcctcaaaagagccaagcccatgccaacctcagggccttttcacaggctgtcctctttcttgagattccccctgtccactcaccacccattcttcatgtggctgactgacatttctcttcctcagccagggtctcccaacctaaattaggacctgtccttcattttccgccgtagcaccagatttctgccttcaacttacattatatgtgcatgtgttttgtttacttactgccagcctctcccacttgactgtaagttcaacaaggtcaaggacaagttcatgttcatgctggaatcccagagcctagtgcagtgcctggaacacagtactcattccagaaatgtttgatgaatgaatgaagtagagaatgggagaaactctcattggttgaccccaactgcaccattttaggcagaggatttttgtttctatggaatttaccagaatttcaccccccagacgctggagagagatgatgcgtattcaaatcccactgctactactcatcatctagatgacctggagcagcttgaccttcctcttgaccaaccctctgtttatacctataaaataggagtaataatggcatttaattcacaggttgttcacaaggatcaactgatagatgtaaagtgcttagcataatgcctgggacatggtgagtggagtcattgccaccatttccccatactttgtgggaagaactgatagacacagcaggtgggatgggctgggagggagaggaactgaggaggaggtggtttgggaaggcttctggaccatgaattagaagtgggtgtggagagagggagggaggaggcatttgggaaacagagcaaagtaggtaacgaaaaagagggaagtttggagctgccattaagtctgagactcttgcagaccacaagcacctgtggtattatttgctgctctactgtggccatgagagatttttggttttgttcttttttctccttataattttttttaaatggagaaaatattcacataacttaaaatcaaccattttaaagtgtataattcactggcgtttagtacctttcacaatattatgcaaccaacacctctatctagttttaaaacactttcatcatcccaaaaggaaactccatgtcaattaagcagtgagaaattatattcaaaactttttgttttgatataattttagatttacagaagagttgaaagttagcatagcttcaccaagcttttctaatgttaataatttcttgcataatctgggtccatttgtcaaaaccgaggtattaacacgggcacaatgctatcaactaaactacagacttttatttgggtttcccctatgtctccacgcatgtcctcttctgttgcacaattgaatccaggaaaccaacattgcttttggagagattactttggaaacctaaagagtcaaaatcaagtccacaattccttgagcctgggatccattgctagtgcaggttttgcattattgccttcctgaggttccatgtgactaaccctgacccagaggagaggtttccattgtgctcatgggctgtgaatccatgaatcaccaagaccccagagcagatcagagcatggcatgttctctaagaatcgcaccttattcagagtctctagcatggccagcgtttcccctgagctgcctcctgaggcaccttccagtctctgcttctctctcttcctcggagtctcagtctggagaggtgaggttatgcatcctggaaatctcagtggcttagaaacaccgaggtgcccatctcattcatgcaccctgtctatggggacccatcttgctccacaccctcttcccttgagactcaagctcatgggccagccactttctggatcactgcatgtttgaaagacagctcttgaggtgcttacaccagcatctgcacattccagcctcaaactgaagcctgtcatgtctgttcaaactcattggctggaaccagtcacacagctgcacccaatcaaaaggaatcagggggtgtgaccctctcatgtgctcagaagcagaggaagagagttggattgttgagcaaacgccttgatgactacagctctcaaagatggtattgaaaggcaggcctgaaaacctgcctccccaaaggcagactgggcgacttcaggctctgagaagaccgtgtgcctactggggtttcaggacaaacatgggtaggcaggagggaggaagcagggccagcacaaagataaggaaaccatgccagctcctagcctcagatgctcagcctgaagcaagcaaccataaacagaaccaaatcatcaggacccaaagcactgaaaaaaaccatgaggcattctatcattccaccaagatgaggtggagccataccattcacgcaatttcatctgcacatccctatcacatgcctcctggaatcatctaagatttactgagaacatatcatgtttgtttttgtttttgtttttgacagagtcttgctctgtcacccaggctggagtgcagtggcgtgatcttggctcactgcaacctctgcctcccaggttcaagcgattctcctgcctcagcctcctgagtagctggaactacaggcgtccaccgccatccccacctaagttttgttcttttagtagagacagggtttcaccatgttggccaggatggtctccatctcctgacctcgtgatccacccacctccgcctcccaaagtgctgggattacaggcatgagccaccgtgcctggccggttcttttacatttataatctcattcagcgatgttggcattagtatctgtagtgggctgaatggtgatccctagaaagatttgtctacatcctaacccctagaacatgtgaacatgatcttatttggcaaaaaaaaaaaaaaaaaaagtcttagtggatacaatgaaattaaggatctcaacttaatatgagatcctcctggattagcccctaaacccaatgacaagtgtccttataggagacagaagaagagaagacaccagcacacagagaagaagtccctgtaaagacaaaggtagagatggagttatgcagctataagccaaggaacacctgaagcgtcagaagctggaagaggccaggaatgaacccttctctagagcctccagaaggaatgtggccctgaagacaccttggttttggacttctggacttctggcttccagaaccatgagagtaaattgttgttgccctaagccaccatgtttgtggtaatttgtatgggagccatagaaaaccaatacagaatccttcatacatagttgaggaagctgaatctcagaacagttgggcaatttctcacagtcatactgataataagtgtcagagccaggtcttgaacttgattggagtggcttcaaagtctgagctcttaaagacagtgcagggaagagctgacagctacatactggagctaggctgcctgggttctaatcccagctctgccattcgtgaactgtgtgttttggggccaattgcttaatctttcaagccttagtttcttcctctataaaatagggctgccaaaaagagtcctttctctgcaaatttattttggaattgaaaggagtggatgagtgaaggtatgaaaagtgctgagaacccgactttgaacacaggaagcactagaaaagcattttgtataaccatacatctgcagaatatttgcttgccatgattctcctaatcatatgctatggcccattcattccccttagtccagggcttcccaatttcaacactaatgatgttttggaactgataattcttggtttccggggctgtcctgggctctgaagatttagcattcctggcccctactcatttgatgtcagtagcaatccctcctcctgagtcttgacaattggtctgtagacattgccaatgtcctacggggggcaaaattgccttccgttgagaaccactgcccttggcctcgcaaagccaggcctttaggatggaagtctctttactgagcagcctggcttgcagctgggtcttggaagcagatccggttttcatgccagaagttgtggaactgtcaggcagatgactgttcacaaagggctgagctatccccagtccccaaggactcagcacactgagtgaagggacgtcagtgctggggacacagctggtaaagttctggctctattatttgacgtttctgagccttcagagaaaatttttgcaatctatccatctgacaaaggtctaacatccagaatctacaaggaacttaaacaaacttacaagaaaaaacaaccccatcaaaaagtgggcaatgtatacgaacagacacttctcaaaagaagatattcatgcagccaacaaacatatgaaaaaaagctcatcatccctggtagttagaaaaatgcaaatcaaaaccacaatgagataccatctcacgccagttagaatggtgatcattaaaaagtctggaaacaacagatgctagcaaggatgtggagaaataggaacgcttttacactgttgctgggagtgtaaattagttcaatcattgtggaagacagtgtggtgattcctcaaggatctagaaccaggaatactatttgacccagcaataccattgctggatatatacccgaaggattacaaatcattctactataaagacacatgcacacatacgtttattgcagcactattcacaatagcaaagacttggaaccagccaaaaagcccataaatgatcgactggttaaagaaaatgtggcacatatacaccacggaatactatgcagccataaaaaagaatgagttcacgtcctttgcaggcacatgggtgaagctggaaaccatcatcctcagcaaagtaacacaggaacagaaaaccaaacaccgcatgttctcactcataaatgggagttggacaatgagcacacatggacacagagaggggaacatcacacaccggggcctgtctgggggtgggggcaaggggagggagagcattaggacaaatacctaatgatgggttgatgggtgcagcaaaccaccatggcacatgtatacctatgtaacaaacctgcacattcagcacatgtatctcagaacttaaagtaaaataaaaaataaaaagatacctattatgtgggactaataataatatcaaactcatctagtgattataggcattaaataaaatattagatgcaaaaagattagcagagtgctggccagagagtcagcatgtagtcagtgtcagctgttatgattctcaccattattccctccgcctggggagctgacccataaagggatgcaaaagcaaaacacctaatcttcatggctgcaaagaccccaaatcaaatcaggatgtgtttgacggccgccatcaagtaaaacatacatggccaggacgagggagggagttggggtgtgtgtaatgtaatttaaaggaatgtctttgcgagggcagaaggaaattgtgagatttacattggcgtgacaaaggttcccgaaagctgcagctctcccacggcctgaaatgatggtatttgctgttggcagatgtagctgaattggaaaaagagagaccgcactcacagactgtcacttcattttattcattggtggctgtcgtccaaagggtgaagtgagagctcctccacggaggaggcggcttgcaggacgataatcctcctccttttccttctcttatacttcgattgcctcagctaccagaggaaagggctaaggccttggagtcaggaggtctcagtttgagtcctggttctgccacttgccagctgtgtgcgtgaccgtgggccagccacccacccctctgaggctctcacctcttatctttctagaggaccaacaaagacacagtgcttatagctggtggtgagcctcctggtgctctttcacctgcctggtacttctcaccttgctctccaaagactgcctgctgcccttctgttcccagaattggttgcctgttgtggtcacctcagtaaagttccaagtttgcatcttcatcttggaaggaggaagaaacattaggctcataatgtcccaccaacagctgatattaagggagtacatctcaccaaagagatcaggcatttggcagtaatgttgaaaagcatggttccctgaaggtgcctataccacctttatgaaaataataggaatagcagcaacaggccattactatttctttctttctttttaaattatactttaagttctgggatacacatgcagaacgtgcaggtttgttacataggtatacatgtgccatggtgatttgctgcacccatcaacccatcatctacattaggtatttctcctaatgctatccctcccctagtcccccaccccacaacagaacccagtgtgtgatattcccctccctgtatccatgtgttctcactgttcaactcccctttatgagtgagaacatgcggtgtttggttttctgttcttgtgttagtttgctgagaatgatggtttcagcttcatccatgtgcctgcaaaggacatgaactcattctccttttatggctgtgtagtattccatggtgtatatgtgccgcattttcttcatccagtctatcattgatgggcattttggttagttccaagtctttgctattgtgaacagtgctgcaataaacatatgtgtgcatgtgtctttatagtagagtgatttataagcctttgggtatctacccagtaatggaattgctgggtcaaatggtatttctggttcttgaggaatcgccacactgtcttccacaatggttgaactactttacactcccaccattactattccttaagcatttattccagggcgacgtgaattatcaaatcctcaggataccgctctgaggggagtgttctgattattcccattttatagaagaaagagaagcttaatgaagtaagataatttgcccaaggccaagcatctcatcaggggtgtcctgtatggttgttcaggttgtgcactgcatgaggaaacgccacctaagaaggtgacatttacattgtagaaaaatactaatttgtattacagcacacagtgagcacagagcttctaggcctctgaggcatgtcctagagcaactggtcctttataaacccaccccgacaccatgataaggcttccactcaggagtgcaggagtcacacactcattgatgcacacgggcatgtagttgtaccaggttcttattgtgccccagtcatcttctgaggttgcttctctcattgctgtagctcttggtggccccattcacatcctataccagacttggagttggctacgattgccttttggggaaggatagggcaggtgcacgttggtgtcagtgggggcctgagagaaccgggctatctgtatacacaaagctggggcctgattcctaatcagatgctatcttaccctgagttccccaaacagcagagccaaaggagaagcttatgtgtgagcatctcacaaacagtgtgagcctagggagcagaagtgagggacggggagccggatgagcttcctgtggctgctgtaacaaattactagaaacttggtggcttagagaaacacacacttgttcttttacagtttactggtggtcacacatgccaaatgagttgcagtgggttgaaatcaaggtgtcagcagggtcttgctctctctggagactatgggggagaatccacttccttgccatttccagcttctggagctgcattcctataattgcatttcttggtatgtggcccctttctgcatcttcaaagtcaatggcactggatcttactccatcctcacattgccttcttctgtaattgcattttccctgccttcctcttatgacacctgtgattatacttagagcctaccagctaagctgggatgatctctccatcaagattcttaatacaattgcatctgcaaaatgtgactgaaaccccccttgccagtaggtaacaatcacagtatcaggagttaggacctggatctgtttgggggccattattcagcctaccatggagtgaagaggggagggagaggagagccaagataaggatgcattttctgcttggccgctcttatgggagactggttgcttgattctctggggccaccaagaagctgtatgaaatgtttccatctcagaactgcctctggggaagagtgggcagtggggaaggaggaagtatctttccacggctcctatcccctgttggtcaaaggttcaccccctggggcatccatactcccacagctgtggattgtgcccaagtggatgctgggggtctcccacctggaggaggagatgagaccagtgggtgccactaggctgcaccgccggccagggcccccaaggagctgcccatcagagcagaggctggaataaggacagacaggtaaggcccagagggcctgaaaggggtgcaaaagaggcgtccaacacaggtgcctgtgctctgtctacaggtacaaaaataagtctgaattaagggaacatggttcatgtgaatttaagtgggatgcttctaatgaaaccccaggtcccagggcccttgctcctgtccccctgccccccgcttcctcttgcctccttgtcctttacacaggtgggggcatcttgtggggccatctgtggtcagttatctgacacaaccagagaggccgcctccctcttcccccttccctgccacataatgcgcttctgggtatgctttaaattgttttatcccggctgggcgtggtggctcacgcctgtactcccagcactttgggaggccaaggatggtggatcgcctgaagtcaggagtttgagaccagcgtggccaacatggcgaaacctcgtctctcctaaaaaatacaaaagtagccgggtatggtggcacacgcctgtaatcccagctattcggaaggctgagacaggagaatcacttgaacccgggagacagaggttgcagtaagccgagatcacaccattgccttccaacctgggggaaaagagcaaaacctccgtctctaaataaataaataaataaataaattgttttaccccatccccactttcttttaccttgaagaaaaggtgttgatgtcctgttttgttttttgtttttaatttgcatcaatgtcccccaaggcaacagccctgcagcatttgggaggcagaaccaaaccctaaatccagatctggtcattgcaaaactcaaaggaaactacaaactccaccgctaccttgcagttcataaggagccaaggcgaacaggggaaggtttgcctcattctctgatcagggtcccacacacccacgcttcaacaggtctagcaaagaggagagaagccccaggaataaaatgaagacttttggagaggagtgggtgcttcattgagaagagcagaactagtagaacgggcatcgtgggcagcatcggggatctaggtggtgctggggtgtggggttgagtgagtggggaaggtttggggaaccccaaaaggaattgagctcagtgagtgcaagtgcgggagaggtaagtgctcctagcctcagagatgggaagctcagggcaatggcttctgaagttctttccctctgaccctgtgggaccagagtaaagctcaggtctaaagaggtctccagaccaggtctttctgactgtctctcacctgcccttgcaccgctgtctcttgaagccctttggatacattcatatgaacttctgtcctcattcccatgcggctcctgccgcccttattcctgactccatcttagcttatgaccacctccgccttgcagttccgggtatggagtgtatttctgctctcccccgactctcagaagccccctccaggactccagcatgtccttgttctatccctcgcacctggtagcacgtctccctggcgagcccttcaggccttcatcctgtctcactccacagcgaagtgattcaggcacttccagcaggttctacatagagaagattctgatgccctagacaggctgagcctgaccctaccagtcccaggcccaacccgaccctggccttgaccttgacctttgagtctcagtcccgtcccaggcttagcccaatgctcctgtcagcctcatccctcaactctgcccccaaaggtgcatttactgcagacagttccaacccctgtcccaggctgagccccagataatcccagattttccctcaacctaatccagcccagaaacggacctttatttaaaatgaatggtatagctcagccctcccacttcggcagctcagctctcatatcatgtgcctcagtgggccgatttattgagaccgtcagggccacgcagtaaaaagaccacctcgcttgggcctgagtccaagttttttcacttaccagcgacatcactttaggctaagttccaacgggcactttctgggccccagtgtcctttacttaccacaaatagctatgacaagagttctgcaacctggcgcctgggagtcctttgtacactgtgggatactgcagggtttcacattcagggatactcggggactgagctttctgtctctcccctgccgcaaagggcagttcttttcccaacactgcaggtgtgctaggccttccacaaatccccgacctgccgacaggatgtttgaacaaggctcctgcaacagccttggccctggtgccatcacccgacctagttttatttccgtttccttgagagaaaatgttatcccagtccgctctctgtagtctgacaaatgtgttcctttatgagggtgaacccagccctgggaggcagcagagcaggtcacgtgctggcagggttgccatggaaagtattcacttttattgaattattcatttgcggcgtccacctagaatgtcccctcaggctcacagctgtgacagacagacacttggacaaagagacgtgtggccaagggcccctccacacgtcagcttccctcccaagagctgtctcccgacagggacagagcagagaactttgagtccgagaccccggatcccctacccatctttgttcaggagacagtggctctacagagatttagtgtgcacactctggctccagaccaccagagttcaagtctcctctcttcctcttctatttcctctactgaaaagtgggaataggaagatacccacctctccaggttgctattacattttagactcaaaaatatctaaaatacaaatagtaatgttggcttttatttatttatttatttttaccaagtaagtgattatgggcctcagttttccccatctgtacaatgaagacaactgaccagataatccctaaggaagcctccagctctgatactgcctgccattgacaatgaagccaaatggcatcgtcctgcctgaattcttaagtttctcagggacacaaaatccattttctccagtagacgttgtcttcttcccagtagcgggggtcacaggtcatggtcgtaaagtgagtgtgtgttaaagactcaaacaggcggccgggtgcggtggctcacgcctgtaaacctaacactttgggaggcctagaagggcagattgcctgagctcaggagttcgagaccagcctgggcaacacagtgaaaccccatctctactaaaatacaaaaaattagctgggtgtggtggcatgtgcctgtagttccagctatgtcggagcctgaggcaggagaatcgcttgaacccgggaggcggaggttgcagtgaactgagatcacaccactgcactccagcctgagcaacagagcgagactccgttttcaaggaaaaaaaaaaaagactcaaacaggcccggttccaatttcaaggtcaggggaaggatgagttctgccttcctttaactctcccaggctaggagtggggtgtgatgtggcgtcatcaatagcctggtgtatcaggcaatttttactgaaatcaccgccaccatctgcaacttgaagggcttgttggggcacgctggcattgctttcaaacaactgattctcggtagaatgaagaaagatcagcaatgtaatgtttgcatggttatttttttgtattctaaactgaaacccgtttttaaagtgaccacctcaacatatgtgtcaagatataaatagagggaggatgttatcacagaagctttggaaatcacctaaatgcccattaggagaggagtggctgtatacactgctaattcctttccaataatttaccatgtagacatgaagagtgagcgagacgtatacttacggacaagcctagatcataagacccaggactgagtaaaaagagatttaaaaagcaagtgctataaaatgtcgtttaaatcaaacctataaacataaatatatagcccagctgtctagggccagcctgtagttttagatctagaaaaagttggcttgtacctcccatccacaaactggggagccccctgacccccatatgtttgggaattcctgaaggaattttctaggcagggtcacatctggattctctagcacctggctaccctccccgccccccgcccctccccgattctgctgaattagctcaaggtcaggattgtgtgactgtctcgtgttccaattttccttccacaccacaactgtccacatatagattcagccctttccttaatgtctccccccagaacactcatactgggtctgtgtgtgttggaagcattctcgaaggcttggggaaggccattgaaggcttttcatagcaacaaagcaagcaacttgaaattcaatcaggtgcccctgcttttcaaatgtcccctgaccactcccatacccagggccccagcctcctgctgggatgcgctttgctcctttatttttctttctattttcagctctattgctctccctctagcgcttgattggccctgggagcaccaagctcctctcactttatgaagcagagcaattcagttctttttctgcctcacccccacatttggatataggccactcttgcaggtatccaaacccgtggaggggctcagggtcagcttccaaccggctctgcaccaaacagaacttgccctcgttagagagctgttggggttgtaaatagcagcataccacacccacccacccccacacacacacacagaaaatcagtctggaattgtgttcaccaaaacgttaacagcggtcatttctgagtaattatattttaggtaattttttgcctaaaatataatttaaggcaaaaattttttctttatatatttttgtattatttgaattttctaaaatgagcatatattagcttcccagtctgaacagggagcagaggaagcaattttgggggaagacaataccctctgtgatgcagaggcccgctcaagttccccctcttcccccacgtagtccgcgagcacatccctttaatgcccacgcctcagtcagtcactgcccaggccctgctgcgactctctcagcaccctcccacctgtcacttccgacccctgctccaactctctcagcaccctcccacctgtcccagctgtgttgccgcagaggctggcaggcagcccacccagacctcccaggagtccagcagaaactgacttcccacacactctgctcacagccattaggagggcaaccgtggcaagggtgcagagagccagtggggcctgggccattttgagagcacccctcctctgcccatttttgcagaagtgattgaacgatgtgagccacacataggattgactggaattactaggagcagggctcaacatcctacatcaccttgctaacagagccttggcctctggagaagaggtgcggagctggagggaggaggagcatccgggaggcctggggagcacttccaacaccacccccttcaacagatgcatcttgtattgctactggtacagtgtgttttgattgatatgtcaccacgctctcttggtgaagggacaggagatgggtaaagttgcttttgttgccaagaaacatgaaagtcaactcatgctcaggaagagaacatgcaggttcatttacgagtagtgaggctcaagatttaggagaagaggtttcagactctcctgctgccccacccccaatctggcctggatttctgcccaaagacctgtctgaggccaatatgaatcatgtaacaggaactggattttaaatccattccgcatggtgtctggcaccgagccagccgctgtgggcactcaacacccttttgtcaaatcaagctcttatggaatcactcttccctctttttaaaaccaccattcatcgagagccttctgtggagcaggcaccaggccatgtgctttacttatgtcatagcccattaaaccatcacactagggcttcaaggtaaagggttattgctcatttttttatagatgaggaaactgcatctcacagagatgaacataagtaactagccaagggtcccacagtccattagtcagctattgtggcaataatgctatgcaacacacactgtctgcagactgaggagatggcaacaagcacttacttcccactgacagccgtggctctcatgggctgggctccaggctgtgggttgggctgtttcaaggatctcattctcctgggaccagtggttacccactccattcctctcatggcagatggcagaagagccagattccaagccaagacatgcaaatatggaacagtttcttggccaagacccacatctatgggagagggaaagatatttcacctcttctattgagagatcttgtaaggtcgcattgcaaagggtatgaatgcatcattctgacaccaggagtcaagaaatgggagtaagggtaccatttgtagacatagctagtggagagctgaagccaggttcatactaagatccttgcaatgctaaaacccgctgtcagtcacaccacagctcttcctctgtcccctctgtgagtgacacactgagctcaagtctcaagatgtaggtagcatggataaagaagcctggaagacttagcagacctcaggagaaaatcgggcctaggatgcttgctcggtgcacttgctgcagcggtagttactctggaagacgacagctgtggacctttgaagactgggtggggagccaaggagagaaactactcctctccatcggaaccagattcagcagcaatgcttgctctctgtccacccggggccaatgaaactgttcactcatctccagcttctggcatgactgtgccccaacgtccaagacaggatggattccacgttttgggacagcattccccaccatatttcatgcagtgcacccccaagatcttatcagtgaacttcaactcttggaacattagtggggaatagcactattaatatctgggggcagtttacttccaacgtctggagctcaagataccctaaactggacttggcagtcacagggaatagccagtgtcctgggtgtaggatctgaggccctgacttccagtctcagctctgaggctcatctctaggcctcgacttccctactgctaaaatggggctgggctatagcccgtgtccaaagcctttcccagcccagcagcttctggtcccaggaggccagcttactgtcggggcattctaaactcagtgttcagctgtgtggtgccttttgtctccccagtttcacctatgcttgtcacatagagtccagagcccttagacttctggaagaaaacagagtaattagggggttggctgactacgggcaggggtcttgttactcagtctcctcaggctgcaagcagggctgaacctggattgctcagtctgcgtggggctcagagctggggcggggtctggggcttccccacaaagcccacatcaggcttggactggagagccattgagggaaaccagtggatgtgtgggcccaggaggcagaacaagggatatagctctggctaattcaagtgggagccacagactagtgacaggagcatcacctggcaacatattaagaatgcagactcttggctgggagcagtggctcatgcctgtaatcccagcactttgggaagccaaggtgggtggatcatttgaggtcaggagttcgagaccagcctggccaacatggtgaaacccttcctctactaaaaatacacaaaaaaattagccaggcttggtggcgggtgcctgtagtcctagctactcaggaggctgaggcagaattgcttgaacatgggaggtggag[134 bp omitted]atttgtgtgcatgttgcagtttcagaagcgctagcgtagcagatgccgatatccaccctcgcctttgccatttcccctgcacactggctcctggggcaccttcactcccagcagcccacgcctgcgattttctgccagagggctgtcctcaggctgctggaggcccctttgcttgtagcaccaagagccagagggcttggaaatttacatccacccaggggcagcccttaacccagaggttccagaacttccacagttcatgaagcccttggagactcagtaatttttcacagcactcattcctaggctaaaaaacaaacaaacaaacaaaacaaacctaacagttccatttattatgtagtaaggtgcaaacagcttaactagtatttatagcctaacaacttagcagctgttgacaaatatgatacccaaaaattaaaacagaaaggaatgtgttgatttcactcataaataaacacaattacttattcatgggatgtgtgtgcctgttgggcactgcacaacttttcagttctcagaatcacattggatgccaccaccctcattgcctgctctactctgatttccattcagtacttcctttttgtcacagcttctgcttaacactcagcttcacaaagatgtgacatcagccaaggaaatgcagggcagtctgatgttgaaactgtgaactgtctcaggagtggtgtctggcagctgttgcggtgtttcccttaaagacttaaaatatgccacggcatctgccttggcacacagtttgagaactatggcctaacccatacttgaggtcatcaggtataaatactccagcttcctcaccctggtggggccagctctgaggcatgatggaccctgtctactgttagactaaactgagttcccctatgtgggctgtgtgctcctattcctgggccccttcccttcccaatctcacttctccactcacctcctggtttatcctgggaacgtttcctaatgcatgtctttcacaggaatcttcatatcagaacctgcttccggagaacacagcctaaggaaaaggcgaacaggaagatatgggcttgggaggcagttaggaggcaatgctgtcatccagggagatgcagattcgcctgggatggtggcagtggatgggcacagcagaccaagttgggaaatactaaggatgtggaattagcagccttggtcaccagccaggtatggatggcaagagaatctcagaaactctgggtttcaccctagtatggggatgccactatcagccatctggagactaagagtcagggcaagtttggggggaaggtaggaagtacattttccaacatgttaagttcaaaccctgaaatcccagttctaaaaaaaggagaaagccgagcaggcaaacttttccacccacttttttttaaaggttctgtttaagtgtatgctcaatgtgccgttcccagcctcgttaacctccctaataattatactaatgactgcagtctccgcgtaaggatgtgttcagaagccccagctcatgcttggcttcacatggcagactatgcgttcctgcgtcgtggtgtgttgctgctgcaccctgaaatgtttaaggcaaacagaggcagcacctgtgaaatatcatggctggcagcgcgtggctcgagctgcctgcaggcactcacagtggcagagccacactccccagagccagacaccaaagccttggttctctgaaggggccagtgaggggggtgggatctgccctcttagtcttccgaggacccgtggggacagccttcccactttgtgcctcatttattctcccaacagtcttgagatgtgagtgttgctatgtccattttgcaggcaagaaacctgaagctgagctgccgttttataattcatccaacacacatattctgagcacctactatatgccagttactttcaaagggtctgggattcaacccagccctgtcccaccctacttctagtagacataaacaatgaataaatcaaaccggccgggcacagtggctcatgcccgtaatcccaacacttcggaggc[135 bp omitted]ggttacagtgagctgagatcacgccaccgcactccagcctgggtgagagagtgagagtctatctcagaaaaaaaaaaaaaatcaagccaagtggtaaagagatggaggacaactgaggcaaggggaggaggagtgagcttaatgaaaggccaagaatttttaacaaattcttggttctacagacttaacaggagaggggaggcctagattttaatagtaatttatctcaatgtaggcttttaaacctcaatttatcattgtcgctgacaacacttggattaatctgttgctcagtgtctttctcactgctgcgaatcccagaaggataaaagggaattgatatacataaagaactaaatttcaattaatgcaagcctgtgctaattttccaacacataacccagaaacattctcattcattacaattttatcgtggcagatcctcgaggggaaacacacccacagatttatttattttttccggtgtcgaatttatcatccaaggcattttgggggaggggggatggggggcagctaactggactctgcgtatccccagcagtccactttttgctgacggatggggagcatttcccagaatctgcctgaagtttctcaagtggcattcaccaattcttcaacagctggaagtgtgggtcttgtgtggttaacccatggaaagggagcaaggggctctggagacggaggcagattctgttattctgaaacggactcagtgtctgcctgtcccttaggctggggcaatttcctgctcttaggagtgggaaacctccctgggggtaggggtctgaggtcagctgtccttctctgcccattctgctcaacaagctgggctgcaagttggttggaggaggggatgcagttgtttctgccctaaagcaccttggcaaacattgcccctgagaggctgtgtctgcagctttttctaatctgtcccccaagtgagggtcctcattctagatgacacagaggcacactgtgtccacctgccctaaactgtcccagctgagaacattcctcaccttgaccccagaagtgtttctgggtgcaggtggcactctctgggagcagggcctctctgccaagcccagactcagcattctcccagacaaactcattagaattccctgttctacccgggcttcccccagtctatgtgactggcaggagcagagccctgttggagttgccttggcccaaacacagggaagaatcagaaacgtaagtcccatggccctcaacttggccccccttgtgcatacagaagcccccttcttacctgggtcatggccttggatccagccccgggatgccagcccagacaccggaatgcctgtgccaggaatcgtggatgcctgtgtctgttctgctcttcctctgagttcctctgtccccacctgtgccccactccagccaggaggccactattcacccccttttcctcttggggctatttgtccctttgcagaagagcaatcgccgatgctttccttccaaataattaaaagggcccggtgaccgagggatgacatggagagttcgactccactgggagaaaggtttaatgttcctcccaattcccaaggcacagcgtgccacacagggctacaggggcaagaaccagcgctggtcaggaggcaaaagcaggagcaagggaaggcatgggtcacagccgtgactagggtttccctgggaaaaacaaggcagggccaggtaagtcgcttcaagctggctagtttgaataattctctcaggctctgggctcaagggagttcccgagttgcccaggacctggcctttggatgatttaggacaagggaagtctgaccctgtgtgtgcgggtaggtaaggtgatggctgggggctcagactctggattcgttggtttgtagatgaaagacatgctcccagctgtgtcctttgctttctctaagagttggatagcccttagaagggaaatatcttcttgggcctgtaagatccccaaatgccagagcatcgatacagaaaataggaaaatgtagttaaatcagccctgtgatgaatggatgctgtattagtctgttctcatgctgctaatatagacatacccaagactgggtaatttgtgaaggaaagaggtttaacggactcacagttccacctggctggggaggcctcacaatcatggtggaaggcaaggaggagcaagtcacctcttacatggatggcagcaggtgaagtgagagcttgtgcaggggaattcttctttgtaagaccatcagatctcatgagagttattcaccaacacgagaacagcacaggaaagacccgcccccatgattcagttacctcccactgggtccctcccatgacacgtgggagttgtgggagctacaattcaaggtgagatttgggttgggacacagccaaaccataccagatgccaaatagacaaatacagaacctccccctccacttcactgcactgggcttctcactgttcatcaactcaacaagcaggcacctgccaggtcctttgtactcagtgccacttctttttggcatctgctttctccaaacagccccgtggctaacttgttccattcttttgggtctcagctcaaacttccttgctcagacaggccttccccagccggctgccccatgtgatgctgccccctatgctctcctcctccccttgcctcagttgtcctccattgtatggacaggttacctgatgtgtactggtgatcagtgaatgctggctactattagtgagttgcctttcattaagctcactccttgggatatggcctagatagtggatggtggctcctcagtccctgggtgctttttatttgccttaaggggtgctgttttttcggggttgggcttcccactctcacactcccctggctcatcatatagcttcctctcacttggcctcaattgctaaatctgtctctatgacccccatacctgtgtctgtcccctaaataccaggcctgtagatccagctgccctgggcacctcttaagttctaggacttggcacagccaagacttcatgttccattttctccccaaatatgcatctgatcctgtgttcccatctcaccagtgccatcatccactcacttattaagtcactgatgtcatcctgggcttctctcatcctcgtatcctcccacccaatcaaagccactccttcttccaacaacagccctcctctccccaccccaagtcacttctctggttcggatcttcgtcagcttgcccctggatattgtaattacctcctcagtggtctcctagcttgagtctccttccaactccttcctcaacctccaaatccatggtcttcctataaccttgccccatcactcccctgcagcaaaacctccagtgattcctcatggcgctcagggcaaagtctaaacgttgaggctctttgcggtccaggccccagccccacgctgagccacacccaccttcactccatcaagatccttgatgtctttggaacacagcacattgtttcttgtgcctttgactgtgcaccttttccttggaatatcttcacccgtctccaccagttgatgttgacttcatgcccagctttggagcccactctcaaatgggatggagtttgcagtcctcaccacggggcaattggaacagtttttctgcagcctgagtcaccctggtttgtgtgttcgccatcactttcctcactctctgaccgtcagccaggacgtaagatgtgtgtgcaccaaagtctgggtgtgtgcacccatctgtgtctgtgctagaggtaggaaggcgggcaggccattggcttgcagtcagaagtcagcagaaggggaacaccacccttctagacacttcagggtccagtttcggccaccttgagacagctcaggactctagagccctgagaccccccgcggagacccatttcctcctgtttcagctcctgcagacatttccaggatcctaccctttctcagaagctgcaggagtccaaaaacaccgttacaagcatgttatcatagttcctcacactaccatgtggcgggagacggctcagagagtaatgaattcatattcgtgtattcccacgattaacatactgaaagcttccttcattaaaattacagtactgcaaacacttcctggttaacttggacaacaaggaagctcctctccaagggataagaagttgtttcaagatgaagatgttatccggcttgtcatatctgatttctcaggccaaaaaagaaaataataattccctatctcattctcattctttttctcccctgctacctctctctctctctctctcctctccctccctcttcggcttcttctcctctttcactgtgtgccaacctctctgcaatttcccaagtaaaaataaaagagatgaccttctacataatcagccattgcaatttggaggtgaatattcaattagttccaggccagggattcctgatcaatattgccttctcacggcaaaacagtgtaacaaactctcgtattaagcaattctaagtcccggtgctgatacccatgaccgacagttaatctgcactttaattaatacctgcccctcagtcagctaaagctgtggattacccacaaaggttttcagtcccccctccccagtgaagctggcaggagcatggctattgtgtgagcctgcgataaagtcagaagcccagcttaacctggccctttggtgctggatctcagggatttagaaatagaacaatagatcctcatgaatggaagggccctgaattgcagtgagattcaggggaagaaaagccacaatttctggggaagaaaatcacccccccgcccaaatacacacgaatacattcctgcactcacacgcacattccacatctctaccaagtaactcctcatcatctacttgcacaccttcagtcacggggagctcaccactctaggagggacccagttctctggccagctatgataatgagatggattctgcctctactgagaatggattttgcctccactgatcctggcttcatatttcaggcttcttgagttccctttctcttcaatatgcccagtgctgtctgccctagcccttcccttggcttctgaaaagatcccctggtggtggaccactaggggcctctgtgataacagtagcatcaacaatcagaactcgctgagcgtttactatgtgccagtcccctgcttagcatgtcataggtgtttttaatccttagaataacactgtgaggaggatgctgttcttattccctgttttatagccagggaaactgaggcactgtggacttaagtcatgcattcaaagcgaggccacacatctaacaaggttgatctctccttcactgatgactcaggggtcacctcctgggcaagacttcacagattctccaaggacagtgtcctcacccaccccacggggctctcaccatgcctcatccatgctcctgctactgccctcatttttgggtattgcaattcacttgtttttttggccttgtctaacactgtctgcctcacatactgctctttggggttctctgggatagaggctgaacgtgcctcattcactggtaatatcccacacttaacacaagcctggttcttaacttgtattatatcttcaaggaatgttacggctcaaacttctatggaggctgctggggcccagaccagcatgcccacagataagatatcaatcaaagcagaagctaaatgtcaggggagctccacaaagacagcctggatatatgcatagaagaaaaggcaatgaagagtagtagaaagagccccagtcaggggagtcaggtgctctgggttttagcctcaattcttccaggctctttgtggtatataggacgagtctctttttctcactgtgtctcagtatccccgtgctgaacctcaggttgtatgaaggactactggacactcctggcaccatcagcctgcagatgagactctgatcgggttgtccaggatgctgctggtgccgagttcggtcagtgactcccagcagagtctcattgccattgctgcagacctgctggacgtggcctgtgtgctacaccccacagtatccccatctcctggctgaaggaagcaaagaggagtggtcggggtgagagccgctacagccgccacggcagcagcaaccacagcaaaccaggtgctattctaagcgctttgcaggcccagctccaaaaggcgggatgcttggaggacttttccaatgtggcattaatgaagctgttggcctgggcctcgccctagaggttctttgtgcagaaataacaccccagacaaagggattccctttgcctctgatcttggcccagcacaaattctcaggccctctctgggctgacaaccttgcttttgaattcacagagaaaagagaagcaaccagacaagcctggatcatcccctctctctccacaaatcttccgactcacctgcatctatacccacattctgaaagatgtgaattggcccatgtccctgtgcctgtggctgtggcagccacggtgtgcccatgggcaatgatggtgggaatggaagttgaatcctgagaggtgctgggacagttagtaagataatttctggaatacacatggcacagggcctgagctgagagctgggttattgtaggcataataaccctccaataatagtagctagcactcactgatcaccggtgcgcatcaggcaatctgtccatataaagaggcagagctcagagacagtcagtccgttggcgagcaggtgaccagttatctaactccagaaccacccacttcagcatccccctagacctctgctaactgagagtgttcttctcactggcacacaggcagtgcccactggcttactgagtaggacccaggtcttctggctcctaattcatcactattacccctattaacccatcacccttctctgccttttttctcctcggtgctcaagtatcattcacatctcaccaagcatttgggcattcccttagtgactcagtgactaatgactgtaatgtgacatgttataaattgtggggtggtctcagggtggaagaccactcccagcgggccctctctgagtgggaaatctctgcaggtgacttgaacagagtagtttactgccaccacgggatgtccagctggattggatgcgtgtgagttacttggtaatggaacctctagcctctgcaatggtttcctcactgcctggtttcgtggcttgtgcagttccctctcacatcacaccagattggcctaggtggccaatagaacatggaaaaagtaatgatatgtggcttccaagcctaggtcataaaagacactactgcttccatctccctcctttgaatcactccctctgggggacacagacacagtgacaatctgatctctcttgcttttccccacatttcccccttttcttttcgacaaaaccgccatcgtcatcatggcccgttctcgatggtcgctgtctcttcggagctgttgggtacacctgcacctcaccatatcatgaggacactctagtagccctgtggcattgcttgcgtggaaagcaacagaagccccctgccaacacccagcactgtctccatccgctcaggtggctatcacaaaataccatggactgggcagcttataaacaacagaaatttggccgggcgcggtggctcacacctgtaatcccagcactttgggaggctgacgtgggtggagcacctgaggtcaggagtttgagaccagcctgaccaataaggtgaaacccggtctctactaaaaatacaaaaattagctgggcgtggtggcgtgcgcctgtagtcccagctactcaggaggctgagacaggagaatcgtttgaatccaggaggtagaggttgcagtgagccgagatcgtcccactgcactgtagcctgggcaacaaagagtgaaactccatcaaaaaaaaaaaaaaaaaaaaaaaaaaaacccagaaatgtatttctcacagttctgaaggctggaagtccaagatcaaagccccagcaggtacaatgtctggccagggtccacttccttgttcacagacgaccatcttttcaatgtaacttcacacaccagaagggaagaggagtcgctttctggcctcttttatgagagcattaatcccattcataaggtgaagccctcctgaatcacctctcaaaggctccaccttctaaaaaaatcaccctgaggtgacgggtctcagtatccccgcgctgaacctcgggttgtgtggaggatttctggacactcctggcaccaccagccagtggctgagactgatagggctgtgcaagctgctgctggggccgagtccagtcagtgagggttaggatttcctaaccctaatccttgaggaccgggatttcaacgtatgaattcgggggagatacgaacatttagatcacagcaaagcaccgacttgccaaccatgtgagtgagttccatcgaaggcagggcctctggctccagtcaagcctccagatgacggcagccctgcagagaccctgagccggaactgcacacccaagctcttcccaaacctcgacccgtagaaaccatggtagatcataaagtctgattgttgttttaagccattaactttggtgtaactttttttatatagtaggcaactaatgcagtgagatatccttccacctcacacctcaggattcactttgtcaacaaactttggtggcatttgtgttctgaaaaattgctcatccaaacacatgcttgcaagagtggccgttttcttccacatcaccctgtccacaggaagaaccctcattcagtgatggagatctgagggcaccacctcaaagggccatttccatgccaaagtaaggcaggtgacataccagttgtgaaaggggtgtctggattcatctcaggtctgtggttaagcaataccaaaccttaatcctcacaaaaatctctctttgtagtgcggattaatagaagtgtagctagactatctcagtgtgggatgtaaggaccacctgcatcagaaagactcaagggaagaaggggaggtttgatgagaataaacatgaccaaacaaatttagaggatcagagcttcactgtcttttccaagccatgagctccttagtgagggtagacccagcttgtgtctgcatcctctgtagtagaagaaacacattaaaatccagcctgactttggacttgagcttttgggtgctagaacatcttcagaagagcacctggggcaggtaatgctgtctcaggtccctgctgtgtgtgaactggagaagcggcttccaggtacagacagcaagacactctagcctctgagacctcccagtcttggattccacacagtgacactctagcctctgagacttcccagtcttggattccacacagtgacactctaacctctgagacctcccagtcttggatcccacacagtgacactgtagcttctgagacctcccagtcttggatcccacacagttcttcagttactgtactttcatcaaaccccatgttacatcttgctaactgaaacaagtgtatatctttaaggagaagttaatgcatatgtttcagattcatcctatgtggaaactatcaaaatattgtgcctgaagtcaagtaacatctagaaaaggcttttggtagtgccaggtttttatatgtctcttgataggactgggttctggccttactgcctgccagagttttaccagtcagtgccaacgtcacctcctccaggaagtcccccctggctgccccagctatctggagctgcccctcctcagagcacaggaggctcctaatcagggccatggtgtatggaactgctcttgttcccacaggtcccaaacctgcccagtcagattgtgagcttccccggggtgagcatctgacaccccctcactggattctgccatcacacaccagcctgggctcacaggtgtgggtcgggagatgaggtggtgctagcaaggctggactgggggatgggaaggcaggaagggcagtggcaactggggcactgatgtatgggaagtttggtttctgagtcctcggcttcttagaattgtccttttccttaggcacattctcaggggtgacaccaaggcagagtccagcagataatgcttgtgcctctcctactgagccaattgagtcttttagaataagaggaagaacattgactctaacctggccacccaataggccctgatgtcagctgcaggcctcagtcactgatagagggcggtaatggccttagattaagccactacctcctctacagacacagggctggcctagccaaaggctaaagctgatatcagccttagactgagcctctaacagagtccacagcctgtgcttggacccctgacctgtaccacaattcagtgtaatgacttggcacacctctccccactgctggggcagccaggggtgcatacccctctccccaagtcctcatttccattcacccagctgctaatgacttaggatctgtttagagtctgggcaactccctgtcagcacagaccacatgagttaactcttctactttaaggatatggggaaagcaaaagataccatctcaaacgagagatgtgttccttctgtttgaaaggccacactaggtcatgcccaccaagcacagcatccttggtaagacctggccctcatcacggctctctctctcccaaagcaccttcccttcactgtgtcttcccagacctcctaggcccagtgcccagcctctagcagcaagcagaaacagactcaggggctggtcctcacagataagatgggcagggtttggaattttcctctctctggcaactcctcccagcttctccatgggtctcggccttccagtttctgctgacgtagatggtgctgctcagaatggccacttcatcccctcttctgaggccccttcctgttattcatgcaaagcaaaaagccagggtcacttccttagtgacgaggacccactgccagacccagtggcagggcagctatacaactctgcatattcataaagggcaatgctgaggttctgcgtgcacatctgtgtgggtgtatctgctggtcaaacactgaaaggaagcctgcgctgcaacagcacaatcaggagcatcaggagtgtaatgcccacgcaagagaacaacaccttccaaaagtcctcatgggggacagagagaaagacctggtgagagatcccgggagaaaccacaggatgagaggtcggcgaaagaacattctgagggggtgcttcctcagcaaggctgcccctttggacacacacccccagaacatcaggaagtcagcaacctgttttgaaagactagggaagactcctcttgcagaaaacatcatgcaactcactccatactccagcaaagatcctttggtgacatcacagattcccagaaagaggatggcacatgggtctcctttttcctgagtaactgggggagtggggtgggtagaataggcatgtttacaatagaaatatgtgggctgtagaaaacaaaaaaataaatcaagaagggcttgtaactgtcacacagaatcaacccagtcttttctcttccacatgttcacagtcagcatcatatgctcaagaatgttctcttctg[139 bp omitted]cctgggaaaccccatctcaactaaaaatacgaaacatcagccaggtgtggtggcacacgtctgtagtcccagctactcgggaggctgacgcaggagaattgcttgaacctgggaggtggagattgcagtgagccgagatcgtgccactgcacttcagcctgggcaacagaatgagactccatctcaaaaaaaaaaaaaaaaaagaatcattttcttctgtcattaaatgctcattgaaagtatcgttttgaagggtacctactaattcatgggaatgtggctggctttacttttttcttactgataagcctttaagtttctcttctcaagatttgctcatattcacaatgctgaaattaatctttgtacgtaagtctttctttgcatctcagattactttattatccaaatcttgaaattattgattatgaacctattaaggcttctgactcacatttctgaattgtacttcaaaatatttgtgccaatttttgcccctaacaaaaacaaatgagatgcccaactctctgcaatctcaccagcaatgagtattttcactttaaaatgttagccattgggacaagtaaaagggcaaatcttatttggtttgaatttccatgattattattcaactatacgtgataggttgatgaagagacaaagaaagtcttgccaatgaaggtcaaaatatcagatacggtactttttaaattattatttgtatacctttaaggagtacaagtattaatacaaatttgttacatggatttattgtgtagtggtgaagtctgggcttgtagtgtacccatcacctgaataacatgcattgtaccttttaagtaatttatcttccctcacccccattctcctacccttccaagtttccaatgtctattattccacactctgtgtcctcgtgtacacattattttgcagtcatttaaaagtcagaacatgattagattaaaaaatgtggtacatacagacaatggaattctattcagccataaaatagaatgaaaccacgtctcttgccgctacaaggcttttttaaaatttttatttatttttatttttatttttatttttgtttttgagacggagcctcgctctgttgcccaggctggagtgcagtggcacgatctcggctcaccacaacctccgcgtcctgggttcaagtgactctcctgcctcagcctcccaagtagctgggattaaaggcacacgccaccacgcctggctaatttttgtatttttagtagggtcggagtttcaccatgttggtcaggctggtctcgaacccctgacctcaagatccgcccacctcagcctcccaaagtgctgggattacaggtatgagccaccgtgcctggccttcagggctttttttttcacctgataactttatttttattttgtctatagagatactttattttattttataatttcaacttttattttagatttgggggatacacttgcaggtttgttacatgagtatattgcatgatgttgaggtttgggatacaaatgatcccagcacccagagagtgagcattgcacccaataagtggttttttaatccttgtccctctccctccctgccccctctagtagtccccagtttctattgagagcatctttccatgagtgcccaacgtttagctcctacttataagtgagagcatgcagtagttgggtttttgttcctgtattaattcacttggcataatggcctcctgcggcattcatgttgctgcaaagaacataactttgttcttttttatgactgcatagtactccatagtgtacatggactacattttctttatccaatccactcttgatgggcatctaggatgattccatgtctctgctattgtgaatagtgctgcaatgaacatacaagtgcatgtgtctttttggtagaatgatttattttcttttggagatacacccagtcatgggattgctgagtgaaatggtagttctgttttaagttacttgagacatctccaaactgctttccacaatggctgaactaaacttaaaagcataaacaagatcgatggtccactagctagattaacaaagaaaaaaaaaagagagaagaacccaataagcacaatcagaaatgacaaaggtaacattacagctgatcccacagcaagacaaagactcctcagagactactattaacatctctaagagcacaaactagaaaatttagaggatacggaaaaattcctggaagcacacaacctcccaagactgaatcaggagaaactgaaacgctgaagagaccaatattgagttctgagactgaatcaataataaaaaacctaccaaccaaaaaaacaaaacaaaacaaaacaaaaaacacccagaccagatggaatagccaaattctaccagacatacaaagaagagctggtaccaattctactaaaactatccaaaaaatcgaggaggagggactgtgctctaactcattctacaaaatcagcatcgccctgctaccaaaagctggcaaagacacaacaaaaaaaaataaaaaactacaggccaatatccctgatgaacatagacacaaaaatcttcaacaaaatactagccaacagaatctagcagcacatcaaaaagttaattcaccacaatcaagtaggcttcatttgtaggatgcaacattggttcaacatacgcaaatcaataaatgtgattcaccacataaacagaattagaaacaaagaccatatgattatctcaatacatgtggaaaaagccttcaatagaatccaacatccgttcatgataaaaaaaaaaaaactcaacaaaccaggcattgaaggaacctattattattatataataaagtattatccatatgataaagtagtatcacaaaataataagagccatctatgacaaatccacagccaacatcataccaaatgagccaaagcagaaagcatttccccagagaactggaacaagacaaggatgcccactctcaccactcctatttaatatagtactagaagtcctagccagagcaatcaggcaagaggaagaaataaaaggcatccaaataggaaaaaaagaagttaaaccatctctgttcactggttatatgattctatgcctggaaaaccctgaaaactgccaaaagcctcctggatctgataaaaatttcaataaagtttcaggatacaaaatcaatgtagaaaaatcagtagcctttctacataacaataacattcaagctacaagcaagatcaagaatgcaattccatttacaataaccacaaaaaaaaactagaaatacatctaaccaaggaggtgatctctataaggagaactacaaaacgctgttgaaagaaatcatagatgacacaaacaaatggaaaaacattccatgctcatggatgggaaggatcaatactgttaaaatagccacactgtccaaagcaatctaaagattcaatgcaattcctatcaaacaaccagcatcattttttacagaactagagaaaaatctaaaattcatatggaaccaaaaagagcctaaatggccaaagcaatcttaagcaaaaagaacaaagctagaggaaatcacattacttaacttcaaactataccataaggctacaataaccagaacagcagtactggtacaaaaacagacacatagatcaatggaacagaatagagaacccagaaataaagccacacacctggtagccatctgattttcaacaaggctgacaaaaataagcagtggggaaagggttccctattcaataaatggtgctgggacaactggctagccatatgcagaagaatgaagctggactcctgtctttcactacatacaaaaattaactcaagatggattaaagatttaaatgtcaaatttaaacctcaaactataagttaaacctcaaactatagttaaacctcaaactataagaatcctagaagaaaacctaggaaataccattctggacattggccttgggaaaaaaattatgactaagtcctcaaaagcaactgcaacaacaaaaaagtggacctaattaaactaaagagcttcttcacagctaaagaaactatcaacagagtaaacagacaccctatagaatgaaagaaaatattttcaaattatgcatccaacaaaggtctaatatccagaatccctaaggagcttaaacaacttaacaagcaaaaaccaaacaaccccattaaaaagtgggcaaaagacatgaacagacacttctcaaaagaagacatataagcaaccaataagcatatgaaaaaatgttcaacatcactagtcatcagagaaatacaaatcaaaaccacaatgagcgcctgtactttgggaagcccaggtgggtgggccacttgaggtcaggagttccagaatagcctggtgacatagccaacatggtgaaaccccatttctactaaaaatacaaaaaaaaaaaaaaaaattagcagtgtgtggtggtgcacacctgtaattccagctgctccggaggctgaggcagaagaatcgcttggacctgggagatggaggttgcagtgagccgaggttatgccactgcactccagcatgggtaacagagtgagactccatcaaataaataaataaataaataaataaataaataaataaataaataaatataaaaacccacatgagatatcatctcacatgagtcagaatggctatcatttaaaaagtcaaaatacagtccttttaaagctggtttggaggatatggttgggatatgctacaaccatgtgcttccatattctgaaccccagaattagaaatagacacaggccacaggcagaacattaccaggcctcctctgcatgaagcagcagcgcagaatacacatgctctgcagcaggtggagttcaaagaggaagcagaaggagaaactaagttaggcggcccaggtcccagtcccaaaggcaccagccaaataattcactcctcttctggtagaagcagatagaggttacagagaggagagaagtcaggggtgtttaagaataacttttccttatagaatctggtagaggaaagaggaagacgtgtttatcccttattccatactaataaagtcggactttctgcttgtgtatggactgcttgggtttggaaagaattcgcaacccctgtctttgtttcctttttaccttcatccttccccttggattttacccttcacatatatagtttgcaaaactgtgccctggctactggtctctgtgacaggtcaggcacaaaaacagcatgttcagactgggtaatttgaggacaatttaataaagaggctatttacaaagatttaggcaaggtgtagggaagtagcagggagagagtgcaggactctggaaccaacacagggcttggaagaggaatattaccaccctggggtagacataccctaaggtgacccacactgagtccacccttgtgtaatcccctccccttgagtgtgggtgggtttttaaccaatagaatatttcaagggtgatgagctattactctcatgaccaccttacattttcaggactatgtcttagcaggttgaaaacagtctcttgctggccttgaaaagcaaaccgtcatgtgctaactgcctagagatagggagacggccatgtggcaaagagctttgggtggcctctagcaccaggggcagtctctatctaatagccagtaaaaaaaaaaaaaaaaaaaaaaatggggccctcagtcatgcagctacaaggaaatgtattcttccaacaggctgaatgagctggaatgaacttggacgcttctcccattcaagcctccagatgagaacacagcctagtggacaccttgatggcaaccttgtgtgatcctgatcagaagacccagt[134 bp omitted]aaacccagtctctactaaaaatacgaaaattagatgggcatagtggcaggcacctgtaatcccagctgcttgggagggtgaggcaggacagtcgcttgaacctgggtggcagaggttgcagtgagctgagattgtgccactgcactccagcctgggtgacagagtgagactccatctcaaataaaataaaataaaaattaaaaaataaaagagaaaaaaagaaaaggaaagttctttatttctaaacgtgcctatgtatgtgcgtgtaaataaaagtcatagatgaacagacatttaatgagaatagtggttacctccaaggagggtcgggggcctgggatagatggtaaaggtctacttacatgttaacatcattgtttaaatgtgtgcagtaacaatatattcatatattatttgtataattagaatactaacaatattaaccaaagaaaaagaaaagatcatttgctcattcataatgtcattctctgttcacaacagtgaacagaggcattacctatttttacttttcaagtaaagaaatgagacccagagaggggaagagggttgtacttgtcggtagccatgcttcagcccatggggcctccaccagctcacaccattcactgtgccttttcggtgaggatggactccagaccctataagcgccttccatgctagtgctcagatcccgcatttgtaggctcacagcccccacttacccccacaatggactgaatgtttgtatcctcccaaaactcatgtgttgaagcctcattccctaatgtgatggttttaagaggtagtgcctttggaaggtaattagtgcccttttgagaagagacacaagagatatgatttctaccccctctatgagaggacacagcaaaaaggtagctgtgtgcaaacaaggaagagagccctcatcaggaactgaattggccaacaccctgatcttggacttcccagcctccagaactgagagaaataaatgtctgttgtttgaaagccccagcctatggcatgcttgttacagcagcccagatggattaaggcactccctccaagaaacatcaggctctctacacatatcctgggtcagaccccctctgagtcactggcagaaaccacagctagaccagtctaggggacaaatgccctattcattgatgcttcaggcaaactcaaaggtgatgcagattgatcctctatgtgacagatgaggaaactgaggctcatggaagggaggacccagacactctgctctgagtaaccagagcctggcttctcctgagcatggtgtgtacggccatttcttggagggagatgccacagggcctctcctcctgcagcacatgacctacctggagcacaggatatgcactgatgaagaacacactgtacaaggtaggctgtgagcactgcctaggtgtgagaaagggaatccaagtgtgggaacttcctccccttcttgaggggtcacctgagccttagcttactcatacactaagctgcatctccaggggagagccgagcctatgggagtctgggctgtgggattgtgtctattcttatttatttctaagtggcagaatgctaaaaaaaaaaaaaaagaaaagaaaagaaaataaagaccataccactgcaagttaattcaatgagttactttttaaaaataaatttgtgcagaaaaaattccttgatcagactctatagcatgcagctaccctgtctgctatgcaggaagccacaggactccctggcaagaggagagcgggggtataggcatcagggcggggggcccgcctggatgcaacgggcagaatttttcctgcagcaatggagctgtaagacagcagccacaggtgtcttccccacctccagctcattcagcctctgactcagtcaccctgcagccccccttctctcccagctcggcctcgggctgttgtattttgcgtcactcatttctctgtggcgccagcagcctttattgttgaaaacgtctgtattttgctttaatcagagctcctgtcaagcactggccccctccttttgtacttcattgtcctcaaggggaaaaaatttattactagcatcattttacacaaacctcccagacgtgctgggattccacaattcatgaagccaccactttggtttctgctcagcaccaggagtcacaaaagacaaaaggaaagaatgtccacctctcctcgagctgctgctaccagtgctggtcagctactgacttctgtgtgatcatcagccagttgctgcccctctctgggcatcaggttcatcacctatgcaaccagggggatagagatggtttccaaagataatttcatcccattctgctataattttgattcataagagtaattggggctgggcgcggtggctcacacctgtaatcctagcactttgggaggtcaattggatcacttgcgatcaggactttgagaccagcctgggcaacatggcaaaactccatctctaccaaaaatacaaaaaaaattagctgggcatcatggcatgcgcctgtggtcccagctacttgggggactgaggtggaaggattgcttgagcccaggaggttggggctgcagtgagctgagatcacaccactgcaccccagcctgggtgacaaagtgagtccctgcctcaaaaaaaaaaaaaaaaaaatagtaattggaattacccagacctgtgcatcacgtctctcggcctctggtcatcgttatccctaatgctcattggactttctgttgtttttttttttttttgagacggagtctcactctgtcgcccaggctggagtgcaggggcgcgatctcggctcactgcaagctccgcctcccgggttcacgccattctccagcctcagcctcctgagtagctgggactacaggcgcccgccaccacgcccggctaattttttgtattttcagta[156 bp omitted]caactttagacttctatgtcttctcccttcctggcctgacaccccaaggccttcatagcttagcttcaacctcctcttcctgccatttctcctgtccctgtcaccccatcccatcactgccaccagcaagaaggctacattttttaaaagtttattttattttatttttctatgtttatttttttattatactttaagttctagggtacatgacttggaagactacattttaagttttcttcatgcctctttgattctgcacatgctgttcctgctacctggagtgccttttccctctctttcatttgtctatctgacttctttgccttcaaaacgcagttcaaacaccaaagtcttgaggaaatgccaggtgaaatcagtctgagcctccactgggctcccctcgcccccctgcacacgccccaagcccagcactgcccactgttctcaggacaggacctggcatggacaggttggatgcagttggctgcatgtggggacacacagggagggccagaactcacctaaacagggctggtggactcatcttaactgtggcacagtgggaagaatgcagttttggagatgcttgtgtcagggttcaaatgctggtgctgtcactttctgggggtgtgcactaaggcaagtcacttaactgcactgtaaaatgcaatgtaaaatggtaattattaagcttaccttgcaaggtcactgtgaggaatagatagaattatgtgatgtctagcacacactgaatggtaggtattcaataaatagtagttatagggcccacttatcattgtttgtctgtctgtctgcctattcatccatctatccatccatccatccatccatccatccatccatccatccaatactgattgagtgttttccacgtgctgggcatagtgctaggctggagatgtggtaatgagtattcaggacaagctaggtctccccctcctgctctgatatttgaagtggccttagtttccgtctcacctctcccagtgccacctgacctggtgctgctctaagctagtgggatgaaactctggcctggctcaggccacccagagaaggagcatcatttccttctgcacctgcctgcctggtgcatgtgggcctggactgccctgaggtgggcctcagagatgggaaagaggctcaagatggtgctgggcagggcctgagccactcagagacatttctgcagcagccttcatggccctgccacactggccgccacttacctggccataccccaacccttcctccaactcctcactcctatccagctgatctactcactcttccacttgccctcccagagggctgttgtgaggactaaatgaattgatgtaggtaaagttctagaaccttcctggcatgcagtgggcactgcagaagcattcaggtccactattctatcatcaaataatcaagatgactcatgcaggggcatcaatgccctcagttcacagtcgtggaaacacgctgagagacagaatgagggtcgcccaaggacaatgtctgggaagaggcgagagagactggaagccaatttggactgcagtgaagggctgaggtcgggctctttcaataaaaacatgttattactgccctgagctgtttacacctccctctagatcagctgcatagccagagtggggaggtgagaagtgggcaagggagctgaagcggtgctacccttctgtgggggtttgatgcagctatagcacccccagccaacacacacacacaacatacgcaacacacaatcctgagaaatcctccctggaaagcttcccctgtagatgcatggacatgagtcagaagtcagccatcggccgggcacggtggctcacgcctgtaatcccagcattttgggagaccgaggtggatgaatcatgaggtcaggagttcaagaccagcctgaccaacatggtgaaaccccgtctctactaaaaatccaaaaattagccaggcgtggtggtgcgtgtctgtaatcccagctactcaggaggctgaggcaggagaatcgcttgaacccaggaggtggaggttgcagtgagccgagatcacaccactgcacgccagcctgggtgacaaaatgagactctgtctaaaaaaaaaaaaaaaagtcagccatcaactgcagttgtgcctgggtagctccttggtgaggtgccttttggaaacacctcctagcaccccaggtagttcccactcccaggtccctccatcccagacaccaagctggaggatttacaaacatctcatgccccaggagctcagagttaggtgttattctgtccatgtcccagacaaatgtcctgtgactcagagagggggcttactcagggacaatgagaggacgagtggcccagcgagataagaaacaagtatcctgagcccttatctaggactttcctccgctttcttgtgccaagtcctcaatgtctcagttgccttgggagctccctatattcctggtccctgagtacaaaagaatgagcaagacagggcatccacaagggctcttccacttggctgtctcctccatcccagccttggggggtcattctatcacccaccacatatcccctcactcggatccaaggaccctctgtgggctttcctgatgcatctcccagcacctcacaaacacccccagcccggctgccttttacggagctgaatcgggccaagacctccctttcacatgagttttattccctttcaaaggtgacttggtgacactgttcagtgcggacccacctcaagcttcggttgtttgtgatttaatgaggagccttttaattataacatctgttgttttaattaccaaaggaattataatgaggctcccggaggaagctgctgccagagtagaagctggagaagaattctcggcatcagagggccgacagggtccctggcacggtggctgccactgagtgtgacccgtcatggagagtacttcatcttcattttaattaagcttcgggggtgagacaggcagcctccggattcaagggagctgactgcccgtatcctgaaagaggctctgctttaggaagcctcggattttgtggatggagagaaggcaaaaagacaaacacgccattttgctgatgctgatagaggcacacattggccactcaataagcaggtggggacaagagcctgggcctccctactgtgcagctgtgtgaccttagcacgatcagcagatgtcggcagattttagttttctcacgtagaaaatgaaagtgatggtcaagtgcaatggctcatgcctgtaatcccagcactttgggaggccaatgcaggaggattacttgagatcaggagtttgagacaagcctgggcaacatagtgagatcccatttctaaaaaaaaaagaaagaaaaaagaaagcaagaaagaaagaaggaaagaaagagaaagaaagaaagaaagaaaggaaggaagaaagaaagaaagaaagaaagaaagatgaaaatgatgccatctctttctctctcaatgaaatgattcatccctgacattagaacctgggtttagagtttgtaagccatgttcacatccatcagatagaaagaactgtgtatattgtaagatgaatttcacacagacagagggtccatgatgaaggtgaggatacgaaccttggtggtagtgaggccaagttcataatggtggtgagagtgattatgtttctgagatagcaatcatgcccattatctcagctctttaccccttctgtatccatgcccattgaagttcctctccctaaagagcgtgagtcttttctcccactgaatttggacaggtcttgcaacttgctgcatttaaaagaatgcaggagaaatgatgataagcctgttccacacctaggtctcggcagatcttgcttgcttctgcttcctctctgcttctccaccacaaccctgagaacttgcccaggcttgcctacagagaatgagattcacatgaaggagagccaatgccattctagatgggccaacagcccaccagctgccagacacatgagtgagcccagcgaagatcagcagagcggctgggcctcctgcagctgaccccagacacacgcacaacaaatgcaatgcttgtaggttacagaggataagtagcaattttatgtagcattatatggtaataaataatagatacactcctccaggttctgaagcaattgagtaatagagacaagaaacagacaggtaacaaaacagtttttgttttgttttgtttttcctagtaagacttggttggaaaatgctacttgaaacttctgaaccaaacctggatttctacccaaattgaatgtacccatccatgactgcccaggtgagattatcatatacaggggaggaagaaaaacacctgcagccatagtcaggctggtcaaaaagagagaatgatccagagaaacccagcaactcatgctcaatcctttaacagaacctcaggccagtcaagacacttctcccctagggaggaatgagcgagggggtagagacaagggtaaaaacgatgtgcccacacttccaggagggctgaaattcctattttcatctttaatggggccatggcagaaatttagggcaagaaagaaaatggcttctgctagacaggagctgatggaggtggtgttgttggaggtggtggtgatggaggtggtggtgatggaggtggtggtgatggaggtggtggtgatggaggtggtggtgatggaggtggtggtgatggaggtggtggtgatggtgatggaggtggtggtgatggagatggtggtgatgggggtggtgctgatggaggtggtggtggtggtggtgatgggggtggtggtgatggagatggtggtgatggtgatggaggtggtggtgatggaggtggtggtggtggaggtggtggtggtgatgggggtggtggtgatggaggtggtggtgatggtggtggtggtgatgggggtggtggtgatggaggtggtggtgatggaggtggtggtggtggtggtgatggaggtggtggtgatggaggtggtggtggtgatgggggtggtggtgatggaggtggtggtgatggtggtggtggtgatgggggtggtgatgatgggggtgatggtgatgggggtggtggtgatggtgatgggggtggtggtgatgggggtgatggtgatgggggtggtggtgatggaggtggtggtgatggagatggtggcgaaggaggtggtggtgatggagttggtgatggtgatggtgatggtggcaaggatgcttcctatccacgggctacaccaagacatcctctggtgtctttgcaggctggccagtcccatgcagatgcttggctgagcagtggggcttttttctatcacagccttcttggagttgcccaatcacagcagcgtcccatgcacctctgccttggatcatgcgtgggatattttcccccattttgcccatctagaaaactgccactcacccatcaagtctcagttcgaatgctgcctttttggtggagtcatcctacgttctacttgacagactcaggttctgtatctccaatgctcctgctccccttcctacatcccctagttggagcacacatcacactgcctgcattctggtttacctgattccccacaggacccttgagggctaagaatgtatcttacccatcaatggataatttgtgcccagcattgaacctggatcatagttagtgcctcatatatgtttgttaaatacattaaatcagcccctatctgagcaagcatggagggagacacaggtaaaggaaaggggtaagtaccagagaggttccaggtataaatgtggaggccagcagggtctggaatgtgtactaaaggactggatcagtggatacagcaatactgactcatcaaccagcccctatatttttctatgaattagctttttaaaaatgttattttaacagaaggaagcaggcaggtctcactcgacagggtattgactttctgtagcacattttattaagactcatcaggactgcaggtctctgcatcctctgagggtgcctgtgtgttcaggaggcagagtgatagggaaattaaatgcagcagctgcatcctttgaagcttttttaagcaggcaaggccagccaactccacagcatacaagctggagaataccagatatgctgccttcctggacttctacccaagcagggaaagatattttctaattagccaagttagataaatgttcttccaccatgctcttgtttggagaataggtggatgctaagaaacgtggctgtggagtgaatttgtgtagagctattcttttgcttttagtggtttccaatatttaaatacacatacacacacacacacacacagctctgatgccacacagctggggaaattgaaatagaagggaatgaaaatattttgaaaagtggagatttaggtggtggtaagacccatgacatattgtgtggccaggacccccaaggagttcccttccatgggcatctttccccctccatagctgactctcaggtacacttccctttcactgggctgtgccctattttatatagcaagtcccaactcaaacaccttcgatgactccttgggagacctggaataatgtctgccttttggggtggtgtttatgacccttcacagtctcacttgaacctgtctttccttttgtcttcttacactcctcttcgaccccacacatcctgtgccactctactgctaaaaccaataatcatcatcattgtcacaaccatcgcttgcgtttattaagtgctgactcttgagtggccccagaacaggagccttacattcattagcttatttcatcttcataattccacgaagctggcactgggatgaccctcagcttgacgatgaggacatttgggctcagatcagttaagggacttgcccaaagctacacaagtaataagtgaccaacggtacccatcctgacctctttgccttggcaaatgctgtttctcctgcttagtggcttcctctctccaccttcttcatctgacaatctcctgctttggagccctggtaaccgtttctttctgatttttgacctcaccttccctgatcaaactcccctggctccatgagtcatttccgaacaaatgccacttggttgaatcccatttctcaattgagtaaatgggattcaaccaagtggcatttgttctgatatgattctgaattgagcaattgtgaaaggagtcttaacggaatgaaaggctgctgttctccagagctttaattctgctctgccagtcaacacatctctgttgggggcctgcgctgtcccaggctctgtgctgtgacctgtgggagtctaaatggaatcaaagaggcactctccagggtttcagacagattggcacctggtgttcagagcactcatttatggtaaaacatctctagtttgtatgcggacattttctttttattttgaatattgttcatgtacaccttctctctctttttctgaactactgttaccaaaatcggtaaaacattggcctttccaagcaaccacacttagttttgctgatgtctttattttatgtggctgtctattatttgttttattgtttattcatttctatcattatcttcattattcccttctttctagtttccctgattctttttccagattcttgaattgattgcttggattgtgggttatatacagctgttctaatttcctaataaatgcattcaacactataaattacccctctaagaaccagtgaaactgcctcagacaagctgagatatgtaatgtctttattactttcaatttgaaatacctgttaatttctgttatgattttcttttttaacccctggataatttagatgtgtgatttttaatttccaaacatgtacttaaaacatctctttgttgttgattactaattttattgcataccagatagagaaactgtaagtaatgaagattctttggaatttattgatacttcttttgtggtctgtgcatagcccattttttgacatgtatcctctctttgtcaagtttaaatttacatttatgcagacataactatacattccttttaatccaccagcttctgaaaaagatttcttaaaaatcgcccactatatttgtttatttgtcaactcttctctctaattatttcagtttttgctttgtatatttcaaggctggtattgacggattcatacacggcaatgcctgtccctaatacttttaatatcttccatcttaagttcagttttgtctgatgttaatacagtcatgcactacatagtgacattttggtcaatggcggaccaagtatatgatggtgttcccataagattataatgaagctgagacattcctattgtctagtgaggttatagccatcataacatcagcatagacaatgcattactcatgtgtttttggtgatgtaggtgtaaaccaatctactgtgctgccagtgatataaaagtatagcacacacacgattacgtacagcacataatacttgataatgataataaaagactgcattactgctttatatacttactatactgtatttttcatcgttattttagaatgtacttctgctgcttataaaaaatggttcactgtaaaacagcttcaggcaggtccttcagggagttttccagaagaaggcattgttatcacgggagatgacagttccatgcatgttattacccctgaagaccttccagtgggacaaaatgtggaggtggaagacagtgatattgatgaccctgaccttgtgtaggcctaggctagtgtgtgtgcttgtgtctttgtttttaacaaaaaaagtttaaaaaggaaaaagaaaaagaaaaaaattttaaataaaaaagatcttatagtgtaagaatataaagaaagaaaatatttttatagttgtacaatgatgtatatatttaatgctaagtgttattacaaaagagtcagaaactttaaaaattaaaggtttttgttatttttattttatttttgagacagagtttcactcttgttgcccaggatggagttcagtcgtgtgatctcagctcactgcaacctccgcctccaggttcaagtgattctcctgcctcagcctccgaagtatctgggattacaggtgtgcaccaccacacctggctaatttttgtatttttagtagagatggggtttcaccatgttggccaggctggtctcaaactcctgatctcaggtgatctgcccgcctcagcctcccaaagtcctgggagtacatgtgtgagccaccgtgcccgttcttaaaaattaaagcttataaaataaaaatgttgcaataagctatggttaattcattattgaagaaaaatattttaaaataaatttgagtgtagtttaagtgcacagtatttatgtagtgtacagtaatgtcctagactttcacattcatgcccactcaccactcacacactgactctcccagagcaagttccagtcctgaaagctcctgcatttatagtaagtgcccttatctcagaacggggatattctcatcactagttgtggtaatatcctcagttcacaaattcagctgtgcaaaaatataaaacttaatttttctataattcaacctaatttctgtttca[169 bp omitted]gcctcccgagtagctgggactacaggcgcccgccaccacacctggctaattttttgtatttttagtagagacaggggtttcactgtgttagccaggatggtctcgatttcctgacctcgtcatccgcctgcctcggactcccaaagtgctgggattacaggcatgagccactgcgcccggccagaagtgtcatttttaaataatcttttatgtcacacttttactgtctcttttctatgtttatatacacaaatacttcctattgtgttacaattgctgacagtattcagtacaccaccgcgatgtccaggtttgtagcctgggagcagtaggctatatgctatagccttggtatgtaataggctatactatccaggtttctgtgaagtgcacgcgatgatgttcacacaacgaaattgtttaacagcacatttctcagagtgtatcccagtttttaagtgatgcctgactatatttcttttgcaggtctgttattgctatttatctctttatttgtaatactttggtgtcatttagttttagctcttttgcttttaaatagtacatgagttgctcttatataaatagttatagatgctcttaaatagcaaccatttttttaaaaatcaaatttaagaatctcttttaattggtaaatttaatatgtttgcattatgtaatagataatctatatttatttctgctgttttattttggtttcccaacttcctattttttctttattttcctttccttgtttctcatggggttgatcaagttgtttttgttgttatttcagatatgatatttttcctgtgctggacttaaaattacattttctataactttattagcaaacatacattttttaagcaatttccagcacaaatctgtaaatacatccctctggttgactgagatgaaaccttagcatagttttattatgagttgagttgggtgaggccatgtccacccatttttcccccaccccaccttgataacatcacctagaatttttatttcaaattgttgaccacaccccttccactatatcagccctcctgaacatggagatgcagccgtgaagacagacagggagacaattacagatttcttaactcattcaggcagctataaccaaataccataaactgaatagcttataagtaacacaattttatttctcatgattctgaaggctgggaagtccaagatcaaggcaacagtagattcagcgtgtggtgagggcctgcttcctgatcaatagatgatgccttttcactgtgtcctcaccggatggtgagggcctgcttcctgatcaatagatgatgccttttcactgtgtcctcaccggatggtgagggcctgcttcctgatcaatagatgatgccttttcactgtgtcctcaccggatggtgagggcctgcttcgtggtcaatagatgatgccttctcatcatgtccttacatggtaggaggggcaagggatgtccctgcagccttttttatcagggcactaaccccattcatgagggctccaccctcctgacctaatcacctcccaaaggccccacctcctcatactatcatcttgggggtgaggatttcaacttatgaacacaaacattcagaccatagcaactgaaaataagtttctatcccagctgaatgggacgcttgagacagaaattaggttgaattacagaaaaataaagtctaattttttttgctcagctgagtttatgaattgagaatattaccacaattagtgacaagcctgtccccattctaagatgagagctcccctggggtggaactatggctgtttcctctctggactcccagtgcacaggccattgcacagagtggacaaaatgaaacatctgggaatgcttcctgggtaggaaagaggaaagcacctcagtagccgagagctggcctggtatcctcagctaggccttggtgctctactgttgaacatgggcaattttgcaggacatcaacattggacatggagactctgagactgtgatgccttaagacccaatccagacccctcataatcatgtttgaacagagtcaacatgaaacttatccagaggtgcatgaaaatcactaaatatctcccaatctgggctgccatgaggaactgctacgtctttagcaatcacagcctttgtctctctctattctcctcaccttacagaaaataattattagataccagatacagaattaccttcaccagcatccaatccagagcaaagctccattcccttgaattctgtccgccatcacctaacataagcctggttcctgtaagtcctattcaagtctcccttactgggatgcttcacagtttcctgtagtggatctttgctcttgtttcaacttgtgtattaaagccaatgttgttaagctacctgtgtgtttctggtggtctctggctggcagtcatgagctatgggtcaggtgggatgtgattgtagtctgactgtagtctgagagtggaagttttcaaatgctggttgaattgagttgaattcatgaaatgggtgcttggagtgcctggaaaatagtgtgcatttcacttctgactgtctctcctctcgagcccaaacccagccaggtctgcctgtcagatactctgagcagctacgggaagggctccttttattgcaaggaagcctcatgtacttcccatttcagcctaataaaagaagccttcacccaggcaggtctactctcagccattcccttcatcctaagagatgaaaggttgaacctagagctagaaatatgttcagaggaatctgctagtggcatggcttgtatgcccaaggcatggagtgtggttactataaggttctcagactgggtcctgcctactcacagccctggaggaggctgatggagaccaagccaaggattcatgaggagtagacaaggacagaactggtttgggactagatgattccctcccagtgcagatggactggtctctggccagccctgtgcccatggcctcacccaacttcttcacatacattgtgactcttctgtgagcagctacatggttcccaaggcaatgggaacgaagctgctagccatggggactagccctggtacagctttttgctgtcagaaactgccaaagaggtattgagtataacgtcttctcacctaagagaaattaaattaactggtaacaaaaatattgatctgggttttggcaaataaagatcaggctgcaggtacacttccagagtgctctccgattacacacacacacactcacactcaggggtgtatacacaaacacatatacacgcttaatcccactgagacatctactctgtcagatttgtggaaatgcaataggaaattggcctcttcccagaagaactgaggtgtcactgagcccaaacttccctccattttcggtaaattgcttgatttctccaggaccccgccgtgtggcctttagtcatggagactgtgagaacaccacgcggagccagaagggagtgactcccaaattcatgcaccgagtctcaaggtagtgggggaagatgagcaggacctgccatccttccctcccagcctggaacgctcagttgcttcatagaccttgctcaaatgtcacctcctctatgaagccttccctgaccttttccgagtagattttatcgcattctcttctgggttccagcagcaaattggaacgacctcttgttgcaggcatcaatacttttgcctgctggatctcttaggatttggttcagctgcacgtaacagagtccctcaaacaaccatggcttaaacagaataggagtgtagtcatccctccaaataaaagcccagggttgggaggcaactacacaatcttctggaatccaggctactctggcttttttttcttcagttctccctggggtgtggttctcaggctcttagcacatgatggtggctggaacttcagccatcagagcatatccaatgccacaggatggagtgggcaggaatcaaggaggaggtgacaaaggattctgccctcttttaagaaaaattttcaaaaactgccacacggcactctacttcaattacactggccaggacttagttacacaggcatgcctacctgccaggaatgcagggaaatgtaatgtttaggt[133 bp omitted]atggtaaaaccccatctctacgaaaaatacaaaaattagccaggcatggtggtgggcacctgcaatcccagctatgtgggagggtgaggcaggagaattgcttgaactcagggggcaggagttgagctgagattgcgccactgctctccagcctgggtgacgagagtgaaactcactctcaaaaaaaaaaaaaaactcaactagtatggaagagcgctgatactggagccaatgatgagtcttcaccagcccctcccagcatctctccttgcatctctccttgccttgttctggttacaggatgcagatctctatagggggctactctttttcctatggatatagccttggtggtgccatcagccaagaggccctgaaaaagctaggggatggtccacattagaccaatcagattatcttgcatggccttaaattgccagcaagtgatccaagatggaaaatgaccggggtgactttgctcctgaaactggagccctgaaaacaccgtccattctctcctactcactggatccttggacaactctctttcccgagctttccaaagcctggtgctgcaatgtatctttaattctgtgagtcatcccacatacttctagtgaattcctcctttttttgcttaagttacccgaagttcatttatgttgcttgcaactcacaatccctaactgattctcctctgttatgtcactaatcatgtacaatttacacacctgtgtctttttcatataactttttacttgcatagaattgttgtacttattttgggggtatatatgatgttctgatacctgcatacaatgtataatgatcaaagcaggataatgggatatccatcacctcgaacgttcacacttgtgtctttaacgagattaaactcttcaaagtagaaagcacatttgctcatctctgtgcatctgccccaaagatcgacactctcccattagggactctgtaaatgtttgtagaaaaaacgaatgagagattctatgtgattctaaggacatgttatgtgaacttacaaaagccatccaacttctttgcctcactgtccccagtaaaatccccattagtaagtgttaaacagtgagggtgaggggaacggctcgtgtattcctgacttctcccttcactctcagaacttccagaacagaaggcacagaatgagttccactggagagcagaacctgctgtcaaatttataaatactggctgggcgcggtgacttatgcctgtaatcccagcactttgggaggctgagacaggaggaacaaaaggtcaggagatcgagaccatcctggccaacaaggtgaaaccccgtctgtactaaaaatacaaaaattggtcgggcaaggtggtgcacacctgtagtcccagctgctcttatggctgaggcaggagaatcgcttgaacccgggaggcagaggttgcagtgagccgagactggaccactgcatgccagcctgggcaacaagagcaaaactccagctcaaaaaacaaaaacaaaaacaaaacaaaacaaaacaaaaagttgtaactaccattgattttatgatcattgctgaagaaagtttttctaaaatttacctactgaaacgatgtcaaattcacaccctcccaatttttcagtttctttatttatctccctcactgaactcagatgcgtcagatgtatctcaaatgactgatcaccgcctggtgtccaggaaccgtgagaccactttctttctcagctcctgttccaactcatgggacaaccatgctaacactatgtgattctcagtccctgatgttagctaatttggagcaagaggatgcctaatccattgcacatcaatcaaattctctctcacaagcagttgtaattgcccttgagaaatgctggtgtgaatcccagatgctcacaggaagagagaatgtgtaaatacgagagggatcaggcttttctgtctggcagccattgtgtcaaaaacataaagaaagtcaatctgtagagaaaagggactgcagaggatgcatagagggaagccgaaagagaaaaccccatggtcttagggagagaaaaccaagagaagcccatcctttctgacagcggtgcaaatgccaaatcttttgcctttgagttagttctgcgacatacctgaatccatgtactaaatactctttgattttcctgagccactctgacatggggacgtacaaccaaaagcctaacaaagacagctgccctaggtcaggcttcatcttctttccagaagactcttgctaggctggcttcctcactgacctccctgcctcctggctccaccgccaatccacctctcacatgggtttccaggcaaacctcaccgtgttagtgcccctgtgtgcagaaaagagttggcgttaccattcttgttttgttttgttttgttttgtttgtttgtttttgaggcagagtctcgctcctgttgcccaagctgcagtacagtggcaccatctctgctcactgaaacctctgcctcccaggttcaagtgattctcctgcctcagcctcccagatagctgggactacaggcgtccaccaccaagcctggctaattttttatattttagtagagctgttgtttcaccgtgttgcccaggctggtctcgaactcctgagctcaggcaatcccctcacctcagcctcccaaagtgctaggattacaggcgtggggctctggcattctaaaaaggcctgttgcaagctcgcccttggctggtgtctgggaacgtaggtgacagaagggtccccatcctaactgatgtgagcggcttactctgcctaaaatgtttgtgcaaacagcgtggtttaagctaaacacctgctttgcctttgggagtctggaaatttagtaagcattagaccaagggtatctatgtgaccatccccccaataaaatctctgggcacggagtctccaatgagctcctctgagagacaacatttcacactgttgccccgacctgtggctcaggcgattgagcaccacatgtgcggcttctctgggagaggacccttggaagcttgtgcctggtcttccccagacttcacccaggagccttttccctttgctggccttactctgtattgttttgctgtgatgaatcgtagccatgagtgtgactgcatgctgagtcccacgagcactcttggccaatcattgcacaaggaggtggtcccggggactccagacacaccctactcgaaacacaagtatccttccaggataaagcccacatcttcgtttgacaccaggaccactgtaagccagctctaattgacatctcaacctcatctctcctgttcccaacctaccaccttatgttccaattacacccctgcctctattacttaccactgtaggcacctgtctttcattcgcctgggcccatctcaggaagccctcctggaggatcccttctatcagaacccagatgttcctgcctcatgctctatcccacttcctaacacagatcctggagtcctagaagtttcaccacacccatatcccaatcaagggtgattcctggaagtcaggggcgcagcccatctatgatttgcatccgcagggacaggccaggccccagcacacagtaggtgctcaatagaggtactgcaagctttagcctccctatacagatgtctctctcctctgaaatcaggaaatcaacacccctgagacttgagacttgtggccttgtgcacctatgatccttttgataaagacacttgagtgcccccttcagcagcacatagactaaaattggaataatactgagaagatt[143 bp omitted]cgccattctcctgcctc[135 bp omitted]gcctcccaaagtgctgggattataggcatgagccaccgtgcctggccgcattccacatttttttaaactaccatgctttagtcattatacagtgcatacattgaaacatcacaccgtaccccacaaacatgtataactattatgtgtcaataataaacaacaaaagaggtacacaaatcccctgactcggtctagattccaatttagactcagcatatatgatggagaacctggaagtgggggctatgcactgagattccctgatctccacattacatgacactgtcagagaagtaaagcgacctaaccgaggttgcccagctggtgagtggcagagctgggactcaactccagaggagtcaggtccagaagtccaccctgtgaacactgtcctcgaatcattgctcagtgtgtgcagacctggcctggggagccgtcccctgagctccggggccgccctgggtcactgtcctcatcagtgacctccccgagggccaggactccaacgctcctcttaccctgctcccagctcagggcagtgcaaactggtgataccatgttgacccccgaagctgacactaattctctcctcccatgtgagcctgctccagagaggtctgaaggttctattctcccaggaggagctccaactgcctcccagctttaaggaaattcacataaattgaatccacatggaaaagaggcattttagcctgtccttcgctgcagcctgagagccagcttcagggtcctgcaccccagaaagctccaggtttcctttggctgaatccttttgacattttcaatggtaaaataaatttgatttgcagaagccatgaaggaactgaggcgatgtgatttccaaaatgcactgtgttattggatatgataaaagactgaatgagtcagtaaatgtagcagtttagtaactgtttaaaaaaacaaaaaaaaagggggccaggtgctgtggctcatacctgtaatcccagcgctttgggaggctgaggtggagtttgagaggtcaggagtttgagaccagcctgaccagtgtggtgaaaccccatctctactaaaaatacaaaaattagccaggcgtggtggtgcacacctgtaatcccaactactcaggaggctgaggcagaattgcttgaacccagggggcagaggttgcggtgagccgagatcgcgccattgcactccagcctgggtgacagagcaagactccgtcccaaaaaaacaaaaaaaaaaacaacaagacccacgtggtctggtggaggaggaggaggaggaggaggaggaggaagaggaggaggaggttgtggtagatggagaaggaaagattcatgcctgaactcactgcccacacccagaacgaatccccagccccactcactccctcacagacacagacagacacacggattcacaccccgcactcctgcatacataaacaggcacagatacagaggcagaagttcacagccacgtgcacataaacataggtgcatgcgccaggcatgtccacgaaaaatcgtcatagccggtgccaatcattgggcagtgaaaatgtgccagctactgcgatgaggactttgcatccttttgtctcagctactaacttactcgtttgcacaactgtctgagataagcaagttattattcccattttacagaaactgaggcaccaagatcttaagtaacttacccaaagagatcccagctaggaagtagggaagccaaggtgagaacccagacagatttcagaagctttgttctcttttttttttattttccttttctttttagtttcattgaaatataatggacggatcctccacttcacagctgtatagtttgatgagttgtgatgtgtgtgcatactcatagactcatcactacaatcaagataatgaacacatctatcacccgcaaaagttttcttgtgcccttggtaatctctcgcttatgtccccatccttgagcagccactcttctgctgtctgtcactgtagattggttttcattatctagaattttctagaatgggtcctgcagtgtgtcctctctaatgcctacagaagcaatgctcactatgaccacactgtgggcatcctcacacatgcatgcacaatgtccgcaagtcctcaccagcacgcacccccagcaccacattcccccctcatcatccccccttacacccattcccaaccccctaggcgtaaagcgctcatatgccccccacccccacccctcactgtatctttcaatccatgctgctcctcgggaataattttgctccattcatcagcaaaataaactcctcactgtttcccagcaaagcagtgcagctcctttctcctaagtccacatgacaggtgactgcagacccaccgtcctcagcacgtgagccctttgtaggctctggttcaattctcaaaagctttgctcattcgacaactatgaagatgcccattcccctaggcactatatattcagcaatgaccaagaagtcacagtcccctctggctatggagctgaatcacctccccagccagcataaccggccttgtgctatggggctggccagaaggggaaaccctccggcactaccaggctggctgaagaaccaagtcacaggttcacaattaagaaagagaataggaagatggcatggaaaggaggggtgaggggaagaggaagagagaaggaccccaaaccaagctcagaccggtgtggctggccaggagaggaggagtcttccttcaaaggtggacgctgaaagacagccacaagacactgtatggagacagtgggacagggcagggctgagcagagctccattgctaggagcatgggccatggctcgtggctgaccaccagcctttatgggacaggagagggggcttgcacgccctgcatcaaagccagttactgcagggggctggtgtccagctcatacctcaggtctaactcacccctaagctgtcaatctggatacacactggaatcattctaggagtttaaaataatattgagccctgggttccactcccagattatctgatttaattgtttgagggaggggtatgtgtcctcggcatatgcatttttaaaagctccccaggtgattatctaatatgcagtccagtttgagaacctctgtaattcttcattcgcctccagtcttaggataggtacctcccaaaagcaccgcaggatacaagaaagcaacaccactagaaggaacgcctccaatcccatctccctgcaaataccctaatgggaatttaacaagatgacctatgttgattagatatcaattaattgtgagaagaggactgaagatttcataagcaatcaatctcactgtcatgtaattaactgaaattggtataagtagtaagtaaatgctcagtgataatgactttcttatcaatatcagatatttaaaacctttcaggttttactggtaattcaatgtcaagataattaggtatcagtcaggcacattaaatattgtttacattggccattgttctttaaatctgtggtaagacagttatggggtccccagccaatggctcttgcttatttgggatgacatgtctaatacattgacaagtattagataagataacatctgaataatgaactaccatggaaagtagagaatgctgagtttatttcagcgtcacacgctggtaccagaagcagacgtctagtctaatatgttatctcagctaagctgagctattgaagaactactgcaaaatcccttccccttaattacattttactgttaattaatcaaattactttatcattaccttgatgccaactcctatgaaccagattacttcaatcatgtcgaacctctacttccttgtagatgtttttgatgtatggaaatcacgatggggctagaagcactcatgactcccgcatgaagaaaaaaaactattgcttccgaccatcaagctttacagacatggacctgaatcatcttaagtgtcccgaggaaggcagaggaggcaaggcatgagtgtgctgagaagagactttacgggagtaaaagatgcaggcggtagagtggctttgattaatagatggtatcattccgttgaaaacaagtccatctggtatattttaaaaattgttagaggtgttccagtgggttatatccccaaaaggccacatcataaaggtgcaataggctccacatcagtgccggccctgggtagaatgctgttcttgctctcatgaagtaagggggaaggaagagggtgctggtcaagaatgtgggcttcagagtggaagccttgaacaaactgcttaaagtctctaggccttgatttatgtatctgtaaaatggggataatgataatatccaccttacagggctatggtggggacgacatgacatcattccttgaactccccagctctatgtacatagcaaaagttcagtaaatgatgattattactatgcttcattttgctttcattgtatcattgtcttgatcccattcagtgcctttgggccgcagtctcactttgatattagtattttcactccctcttctatggttgtggttagggctgaggcacttttcctgacatccttttgcccagacctttattttttacctttcttaatcatttctttctagatgagatgctggtaaacaggatagagccaagctttctttcttgactcagtctggagtttctgccttttattcagggggttcagtcaatttcctctcatgggaataattggcacacttgttttatttctgccctcttaagttatggctactgtttattttactttgttattgttttatttttccttttccttcatttatctggctttgttaagtgactatgcattcctatcctctccactccatgattttgaaaattccctctggcttcccagctattagcgatgaccattctcatctttatatacacgaagcaccctgtattcttctcgttatgttaaacagccctgtcctagcacagaagtcctctcctagcccttcattgaggtctacggaatctctcttcttcactatctgtctctgtctccctgatttttctctttgtatttgggccctaggttttgagatacttctactcctgatcttctgtcattattttaattctccatagagacaattctctaattaatatattcatttattatgtccaaacttcaagatttaagaaccacttctaagtttcagaaaatctttacttcactcccattggatctctttaagagtttgtatttcttttttgtccaagctgtctcctggatcttgcccagatctatttcagacacagacacctgtcccaattcttccactgggtctgcttccctctggttcctgtccccctcatctgtggtttttttctttgcctgctcatgctccctgtaccctcagcggccgactccagttgtcacagcccaaccagagtgacaggcacatgggcttctgttcctctggactggcagtgactgacctggccggcctctgctgagaccctggaggatgcctctctgctcccaggggaaccatgtcaatggtagcgctcccccaaactcaacacctgtgagcaattcagcctcgggtggaaaagaaaaaaaaatgacaaaatgactgcagcaaaatttaaattttaaaaataatttgcaaattggtcattggccaaattgattgtatgatgaattgactggtgtagacatagtttttggtaaatttgtttgcttcctcacaaaagaactggcaatccagtttgcaaggatactcaccaaggccccttcccgccttgctctggagagggtgttgagaggcagtgggcaagtgggaggtggggacaggcgttcagccaccatcttccagagttctcattgtgttgccactggagtcatctgcttctgctttttttttttttttttttttttttttgagatgaagtctcactctgtcacccaggctggagtacaaaggcacgatcttggctcactgcaacctccgtctcccgggttcaagtgattctcctgcctcagcctcctgcgtagctgggattacaggcgcatgccaccacacctggctaattattttattttcagtagagatggggtttcaccatgttggtcaggctggtctcgaactcctgacgttgtgatccagcctcctcccaaagtgctaggattacaggcgtgagccaccgtgcccagtcttcttctgctttaaaccaggtgaattgtacttgtggacttgaaggtgcaagtgagagtgtgtgttgatactggtgtccgtagctacaagccctgcagagccagctcataacacaagtgccagctattgctaaggagaagcaaggctgacttggagtgtattttccagaatatgagtggcagctgtgatgccctgctctgccccgtgaggtgggagccaggctgatgggccatgtccccaggaggccagcatggggagggactagagacatcatactacagaagactgtggactgggcttgggggctgagaggtaggagggtggggggtaggagtcagagtgctcagcctagagaagacgcactaacatggagtgatgtcctaggaagagcgataggcttctgtgtggccccaagggctgggactgaggcagtgtggaggctaggaagaccattctaccatcagagcttaccagcgatggacttgtctaggaggagggagctctccatcataaaaggcatgcaagccagacctgagaggtcatttgatggagacagattgggtaattccagagcttcttcctacctgggagtctgtaattcctaaaatggctgagatgtaatggttgggggagccctacttctcaccacaggtactaagattcgtgaaccctgaatgcgctgagcagaggaatggggaagctttgctatggaaaaagtcacaatacccttatctttcctcctaagagtcttacatccatcttgagggagtaacctctttctttattttaggcaaattatcgtgatgtgctttttagtaacataaatactcaccagttgttcttggagagaactgtgagatcaccattgaccagcatacaaatcttttaaattaaaatttttagggttctctttcacccctcaagttgggaaatagtggcacccagtcatgtagctctgagagtctcttgtctcccacccccatatgggaagatatggaagctatagagaaatacttcctgcttctacgtgaaccgttgctgcaaatggatgcagattcctcattttcttggggaaatgggagtccttttctagggacttattttttattattattatttttagatggatccttgctctgtcatcaggctggaatgcagtggcataatcttggctcactgcaacctccgcctcctgagttcaagtgatacttctgcctcagcctcccaagtagctggaactacaggtgcatgccaccacgcctggataatttttttgtattttagtagagatggggtttcaccatgttggccagggtggactcaatctcccgaccttgtgatccgcctgtctctgcctcccagagtgctgggattacaggcatgagccacagcgcctggctgggactttttatgggagaggaaaatctgacctcagagggaacacgctactgttacctgctccacctgcccgctgacccttcattgattcctacaagaagagcctagtggtctctggatagctagatgtttatttccaagaatgggctaggtctgacacaagagcaactgataactctgtccaggcccattgagtccaagggtgttccagacgtcacactaggcatggaggaaacacagaagcagcataagtgattgacgagtaaaaggagataagggttttgacaaaggtgacctgggttcactgttggcctatagagagcagaggaggtgaggcctaggggaacagtgtggatgctgcctcctccatgccccacttgcgaggcccactcatcaggcaactaagcacatgggagcaaggatctctatgtcactgtcttgcatcagatgctgagctgctcaagaatgggatcctctctggtttctctgctcattcctcttcacagggaagggtcagtcacattcaaggtatgccatgagcagaaagtgatgggagagagtggagaagtggcagtagctccatcaaggaggtcttgcaattctagctaaggagctggacttcgagcagcaggtggcacggccaggggagcagggagcggaactgagggcatggtgggagttagctatgaagcagtgagctctgctgcatccatggccttggtgggccatcttggaagggaccagcaggacagtggctgctccagacccatcccacccaaaaatgtcccctagagcaggagagagacctgtgggagaagcaagccgatataaatcagagctaacctgtgctgatccccggctccctaaatcaagaatctgacaggttttctgggcgagaatcaatcttactgtccccacagtaaataccataatcctttttccagtgtggtttagagaatgtaactgccatgctcatgatttattcgaaaaatattctgccaggttatgtgaacgaatgggggagtccacgtgcttttaaacaggagttcagggagctctcaatgggactggcacctccctcttggggcagctccagcaggctgccagcttccacacctgccccatgtggtgggccaccagaaccaaggacacgggaactgagggcgggcagcaggacaccagaatgaccactctttagctgggagggcagagcaaaggcagccagccagccagtaggtggccaggcctctcagggctcctttctatgaaaaccatgactggacttctcttttctatattttttgtaatttatttgttacgtagctaatatgagaatgcattcttggccgggcgcagtgactcacgcctgtaatcccagcactttgagaggccgaggtgggtagatcatctgaggtctggagttcaagatcagcctgaccaacatggagaaaacctgtctgtattaaaaatacaaaaattagctggacttggtggcaggtgcctgtaattccagctactcgggaggctgaggcaggagaatcacttgaacccaggaggtggaggttgcagtgagccgagatcgcaccactgcactgcagcctgggcgacagagcgagactgtttaaaaaataaaagaaaagaaaaagaaaaaaaaagaatgcattcttgttatgcctaattcaaataattcagaagttttcagagaaaaatgtgaatctcccttctataccctcccatgactcaactcactgcgttcctgtttcttctttcagagacggcactggcaaacgcttagttaccaccatcctatattcataaacatgtatacccttttcgcacaaataggttcttttttttttttgagacaaagtctcgctctgtcacccaggctggagtgcaatggtgcaatcttggctcactacaacctccgcctcccaggttcaagcaattctcctgcctcagcctcccgagtagctgagactacagatgtgtgccaccatgtccggctaattttctgtatttttagtatcgacggggttttcactatgttggtcaggttggtctcgaactcctgaccttgtgaaggttctttttttatgatatgtagtttatagttacagtttatgtatttatatggtatttttatatagtgtttatatatgcatgcatacataaatatatagacccacacatatacagtatgtatgggtttatactgcttccagttgtttttaacctttgtaaacaaaatcatgatgcatttctttataactaaatgcatcttggcacatatgtatgagttttcttttaatatagattctgaatgagacatggctggtgggagttctgacaaattctaccaaattgccctccaagcataatatgccaatgggatataagtgtctgtttccctatattactaggaacgctttcatttaatttttgccaagttgatgggcataagcccctcattgttgatttacccataactggttcctaagaacgtggaacacacctccctgcatttaggggtttggtgcgtctttttttctaggtattgtctaatcattcctttgcccagctttctattaagttctttgtctttttttcttatggaatttagggattttcatcttcgtctttcaaacatgttgcaaatacttcttttcactttgctttgctgttaactttgtggtgtctttcttgtttagaaattttaaatttttaaagaattcggatttgattgtcttttcatttatggcttccagattttgtgatttgcatgggaaggctttcctttcccagaattatagtctcatttttttcccctctattttcttctaatgtttttgcatttctgtatctcacattcactcacggttagcctccagcatctctgctttctctgttacttttctcttctgaaactacacttccccccaggtaatcgtagtcatgctgtgactttaatcagcacttttaggctcataattccctcatgtgtatctctgatcttgctttcctctgggctcctgacttgcatatctgcctatctacatgatatcacaaaagtaccgcagactctacaaacccaaaactgaactcatgatctttctctctaaactttgacttcttttctatcctagtggatggctcagaaacttgagcctcactctttgcagtgccctgtccttcatactccatgttgatgtcccgccaagactttggccgggacctggtcagttgcacctaccaaattctctgccactgttctgtctctccaccctcacaaccccagcctaagctgccttcatgtctggccaggtttctgcattagcctgctaacccgtctcttcagcttcactctcacctgctctaacctttctccacaaagcagtcttcaagatacaaatgtgatcatgcaaccctcttcgtctcaaaaccattcagaggacgaacaaaatctttcttgtggccaacaggactttgcgtgacctgggccctgcctgcttccccggtctcagtctcagtctctgtgcaccagccatgctgtcttgttctgtttctccagccagaggtcctttccacatgcctctccctctacacctctacacgttatatcttctcccttttattttttttttcttagacaaagtttcgctcttgttgcccaggctggagtgcaatggcatgatctcggttcactgcaatctctgcctcccatgttcaagcgattctcctgcctcagcctctaaagtagctgggattacaggcgcccaccaccacacctggctaatttttgtattttttagtagagacggggtttcaccatgttggccaggctgatcttgaactcctgacttcaggtgatcctaccgccttggcctcctaaagtgctggaattataggcatgagccaccacgcctggcctatattttctccttttccataccccacatctattcctcacttgaatcctattcctccttgctctctcagctcaaatgacattcttatgatcccatagattaggccaggccctcatgctctattttctcatagcgttatgaagctttttctcataacactcatcccagcttatgtttatgtatttaagcatgtgatgcatgtctgccaagacaaggccaagaatgctccctcttctgagttgcaataaaaagcgaggacttggccgggtgcagtggctcacgcctataatcccagcactttgggaggctgaggcaggcagatcacgaggtcagtagatcgagaccatcttggccaacatgtgaaatcccatctctactgaaatagaaaaaattagccgggcgcggtggctcacgcctgtaatcccagcattttgggaggccgaggcgggtggaccatgaggtcaggagatcgagaccaacttggccaacatggtgataccccatctctactaaaatacaaaaaattagctgggtgtggtggcaggtacctgtaatcccagctacttgggaggctgaggcaggggaatcgcttgaacctgggaggtggaggttgcaatgagctgagattgcaccactgcactccagcctggcaacagagcaagattccgtccaaaaaaaaaaaaaaaagcgaggacttgtttctcttcgccaagaccccagtgaagctctgttcttgtcttgcgggagagagtgaggagaagtacaaggcatgggaggagacaagaatattgtttctttagggaaaggttggaatgggacgatgatgtattgggatgcagctcacctcccatcctctgacaaaatcagccaaggaaattgtgagtgtgtagttgtccgagtggataagggagaaagaatccatgagtggtcctggcagtttgtacttaaacatcagacagagccttcatggcacataagctggactaagctcagatgtatgcttacaataatg[131 bp omitted]taaaaccctgtctctactaaaaatacaaaaattagccaggcatggtggcaggcacctgtaatcccagctacttgggaggctggggcaggaaaatcgcctgaacctgggaggcagagtttgcagtgtgctgagatcacaccattgcactacagcctgggcaacaagagtgaaactccatctcaaaaaataaaaataaataataaaagtgtgcgacctaacaactacagaatacacagtttttcaagtgcatatggaatactctgggccataacaaatgtctctacaaatttttaaagattctagttatacaaagtatgttttctgaccacaatagaatcaatttgaaatcaataatagagcagtattgggaaagtccctaaatacttgtggactaaataacacagttctaaataatgatgggtcaaagaaggaatcaaaaaggaaattaaaaagcatttccagctaaataaaaacacagcatatcaaaacgtgttgggtgctgccaaagtagtacttggaggtaaacgtgtaacactaaacacctgcattagaaaagatggaaagtttcaagtcattcagatcaatgatctcagcctccaccttaaaaaactagaaaaagaagggccaattaaatccaaagtaagcaaaacaaagtaataaaaaagatcagagcaaaagccagtgggattagaagcagagcaacaatagagaaaattagtaaaaccaaaagccagttccttaagaagatgcattctagatagactgatcaggaaaaaaagagtgaagacaaaaattaccaatagaggtagcattcatcaattctacagatattaaaaagataatgggaaaatatcatgaatgactatattccaataaatttgacatcttagatgaaacgtataacttcttggaaaaatctaaagtacaaattatcagttgagaagtactaggtcatttgaagagcccaaaatctattaaagaaattgaattatttgtttgtttttaaataaaaagtcttctcacaaagaaaactccaggcccaaatgacttcatttgtaaattctaccaaacacttaagggagaaataatatgaattcaactgaaactctcagaaaatttaaaagattattcttaacttattttattaggccagcattaccctgataccaaaaacagatacagacattaaagaaaagaaaactacaaatcaatatttttatgaatatagattccaaaatttcttataaaattttagcaaatttaatccaacaatatattaaaagaataatatatgataaccaagtaaaatttatccaagcatgcaaaatggttaagcattttttttaaaaaaacaattatttatcatgacaacaaacacttaaaaagtaaaactctacgatcatttcaatagaggcagaaaaagcatttgacaaaatccaacatcaattcctgatttaaaaaaaaaaaaaaaccctaggaatagaagaatatttcctcaatccaataaaggaacgaggcaaagatgactgctttcaccatttttagtaaacattccactgaaggttctaatcagtgaagtaagtcaagaaaaagataaaaggcatccagagtggaaaggaagaattgaaattgtctttatttgcacacgacattattgtctgtggaaaaacgttttatgaaaatctaccgaaaaaagcaggataactaaaaagcgactttagcaaggttgtaggatatagtcaaaattcagaaatcaactctatttctatatactagcaacaatcagaaagagaaactaagaaataatattacaatagcatcaaaacatgaaataaatagagataaatctgacaaaagacatacaagacgtgtacactgaaaactgtaaaacattcatgagaaacattaaagatgacctaaataaaaggagagatatattgtgttcatagacaaaaagactcaatactgttaagacgttaattctccccaaaatgaactttaaattcaatacaatcccagttaaaattccagcaagctttttaaaagagaagctaccaaaatgaatcagaaattcatatgaaaatgcaaaagacgtgggggggtcaaaacaactttgaaaatgaagaacaaagttggagggctaatattttctaatttcaagagttattataaagctacagccatcaacacactatggtgttacaaacagatcaacagaacagaatacagaatccaaaaataagtgaacacacatacggataattgaattttgacaaacgtgcaaaagcaattcaatggataaaggatagtctttttaacaagcagtgctagaacaattggatgtacatgtgcaaaaaaatgaactttgatgtttctcttgcaccatattatgaatgtttgtgttccttaaaatttatattttgaagccttaatccccaatgtgatggtatttggagatgaagtctttaggaagtgattaggttaagatgagatcgtgaggatggggcccccataataagattagtgcccttatcagctgaaagaggaagagaccagagctcactctctctctttgctatgtgaatatacaacaagaaggcttccgctgacagtggaagacagctttagcaggaactagtgggagcaatagcaggaccaaataaaccaaaccgaccaaaataacaccacagaagttctgaaagttaaaccatcactggaactgtatcccacaaaaagtaagttaggacccagtgtgtgatgtcccccttcctgtgtccaaatgttctcattgttcagttcccacctatgagtaagaacatgcggtgtttgtttttttgtccttgcaatagtttgctgagttggggggaggggggagggatagcattaggagatatacctaatgtaaatgacgagttagtgggcgcaggacaccaacatggcacatgtatacatatgtaacaaacctgcacattgtgcacatgtaccctagaacttaaagtaaaaaaaaaaaaaaaaaaaaaaaatatatatatatatatatatatatatatatatatagtaagttaggaccagcatgctaatcctaaacagagtggcacctgttaaaataaaaaattcaaataccacccagtgtctcctaacataaatgatgacatgtgcaggctataaccaaaaatgactcatcccaccaagaaccacaaaaaccacaatttgagtaagaaaagacaaccaactgatgccaacagtgagatgagtcatatggcaggattctctgacaaggattttaaaggagccatcacaaagatccatcaatggtaaattacaaattctcttgaaacaaatgagaaaacaaaaacaaaaacaaatctcagttttaaaaggttatttaaggccgggagccttaaatacgacagaattgtaacaggaaaatctctaaataggtggaaattaaaataatttaaacttctcaataatctataagacaaagaagtctcaatagactaaatgaaaataaaaatacaacacaacaaaatatgtggaatgcagataaagcagccctgagagggaatttaatggcactgaatgcttacacaagaaatgaggaaaaacagccgggcgcagtggctcacacctggaatctcagcactttgggaggccgagacgggtggatcacaaggtgaagagatcaagaccagcatggctaacatggtgaaaccctgtctctactaaaaatacaaaaattagctgggcgtggtggtgcctgcctgtaatcccagctactcaggaggctgaggcaggagaatcgcttgaacccaggaggcagaggttgcagtgagccaagatcgtgctactgcactccagcctggcgacagagcaggactctgtcaaaaaaaaaaaaaaaaaaaaaaaaaaaggaaaaacctcaaatcaataatataagttgctacctcaagaaacttggggggaaaaaaaagagcaaaataaactcagagcaggaataagagaggaaataaagattacagcagaactcaatgaaatcaaaaacaggaaaacaatagagaaaaatctgcttcttcaaaaacatcaataaaatttgcaaatctttagaaagattgacaaaaatgaaagaaaacacaaatcaccaatatcaagagtgaaataggggccaggtgcggtggtggctcatgcttgtaatcccagcactttgggaggccgaggtgggtggatcacgaggttgggagttcaagactagcctgtccaacgcagggaaacccaaaaaaaaaaaaaaaaaaaaaaaaaaaacaccagactaatatctctcatgaatttgatgcaaaaattttcaacaaagtattagcaaggtcaacctaaaaatgtatgaaggtcattataagttatgaccaagtggtatttatcccaggtgtgaaaggttggtttaacatttgaaatatcaatcaataggccaggtgcagtggctcatgcctgcaattccagtactttgggaggccgaggcaggcagtttgcttgagctcaggagtttgagaccagcctgggcaacgtggcaaaacctcatctctacaaaaaatacaaaaaaattagcaatgcgtgatggtgcatgcctggagtcccagctacttgggaggctgaggtgggaggttgcttgagcctgggaggtggaggttgcaatgagccatgcactccagtgtaggcaacagagggagatcctgtcttaaaagaaaaatgaataaataaataaataatcaatataatctgccctattaacaagataaagaagaaaaactgcgtaatcatatcaattaattcagaaaaagcatttgagaaaatccaacactcattcttaatttttttaagaccccaaaagttaggaacttgatgaaaacctctatgaagaaacccgatagctaacgtaataattaatggttaaagacattatactttctccctaagatacaggaacaagaaaagaatgtcttttctcacctctctgatttgacatagcactagttctagatactgcataaggcaggaaaagaaaaacatacaaaagacatacaggttgcaatggaagaggtaaaactgcctctatttgcagatgacatgattatgtatgtacaaaagctcaaggaagcaacaaaaatactctagaatcaataaaggagttcagcaagtttgcaggataaaagatcaaaacacaaagaccgattgcatctttatatattaacaatgaggagaatcgcttgaacccgggaggtggatgttgcagtgagccaagatggcgccactgcactccagcctgggtgacagagcgagattccgtctcaaaaaaaaaaaaaaaaaaattataactattttatcaatgaaaacagccagctcccgctcccgctcccgctccctctccttctccccacggtctccctctccccacggtctccctctctttccacggtctccctctgatgccgagccgaagctggactgtactgctgccatctcaactcactgcaacctccctgcctgattctcctgcctcagcctgccgagtgcctgcgattgcaggcgcgcgccaccacacctgactggttttcgtatttttttggtggagacggggtttcgctgtgttggccgggctggtctccagctcctaaccggagtgatccaccagcctcggcctcccgaggtgccaggattgcagacagagtctcgttcactcagtgctcaatggtgcccaggctggagtgcagtggcgtgatctcggctagctacaacctctacctcccagccgcctgccttggcctcccaaagtgccgagattgcagcctctgcccggccgccaccccgtctgggatatgaggagcgtctctgcccagccgccatcccatctaggaagtgaggagcgcctcttcccggccaccatcccatctaggaagtgaggagcgtctctgctcagccgcccatcgtctgagatgtggggagcgcctctgccccgccgccccatctgggatgtgaggagcgcctctgcccggccgcgaccccgtctgggaggtgaggagcgtctctgcccggccgccccatctgagaagtgaggagaccctctgcctggcaaccgccccatctgagaagtgaggagcccctccgcctggcagccaccccgtctgggaagtgaggagcgtctccgcccggcagccaccccgtccgggagggaggtgggggtcagccccccgcccggccagccgccccgtccgggaggtgaggggcgcctctgcccggccgcccctactgggaagtgaggagcccctctgcccggccaccaccccgtctgggaggtgtgcccaacagctcattgagaacgggccaggacgacaatggcggctttgtggaatagaaaggggggaaaggtggggaagagattgagaaatcggatggttgccgtgtctgtgtagaaagaagtagacatgggagacttttcattttgttctgtactaagaaaaattcttctgccttgggatcctgttgatctgtgaccttacccccaaccctgtgctctctgaaacatgtgctgtgtccactcagggttaaatggattaagggcggtgcaagatgtgctttgttaaacagatgcttgaaggcagcatgctcgttaagagtcatcgccactccctaatctcaagtacccagggacacaaacactgcggagggcgcagggtcctctgcctaggaaaaccagagacctttgttcacttgtttatctgctgaccttccctccactattgtcctatgaccctgccaaatccccctctgcgagaaacacccaagaatgatcaataaaaaaaaataaaaaaataaaaataaaaaaaaaagaactgaataaacataccacatttaaattaaaaaaaaaaaaaaagaaaacagccaatgccaaagagaaagatagaacgaaaatgccctattccatggaacaattaaaaaaaaattaacaactacttattccaatcactaaaagtggatgaccagacgttatggacctcctgatatgatgcaacaggaaggaccattaggaagtgttcctgaaaaaaaaagttttaagaataagtcaaccaccactaggaaacaattaaccaaattcagaatatgggaaattctatataacaaatgaactactttagtcaataaacaaatggcatttaaaaaaagaaaggggtctttctttaaaaattaaaagatactttaaaaaactgaaacaagaccaaaaatatgcaatgtatagactctgtgtggatactgatttaagcgaattaacaataaaaatttttaagcacctggcaaactttgaacgtggagtagacataagatattaagaaacattgttaggtatgataatgacattgtagtttatgtttaaagtcattgagatttataataaagtatccagggatgaaataaaaaaaaaaaaaaaacaatgaatacacagaaactgaaattaaaagcataatgtcatttacaactacttcgaagataatgaaacacttaggtatatattaaacaaaacatgtacagaatctgtatatgaaaaattacaaaatcctgatgaaagacatcaaagaaaatctaaataaacagagatgctgtgttcatgtattagaaaattcggcatcttaaaggtattcattctccctgcattgttctacaggtttaatgcaatttccattgaaatcccagcaaggttttagtggacatagacaagcttattctaaaatttatttgaaaaggcacagattctaaaatag[132 bp omitted]tactaaaaacccgtctctactacaaatacaaaaaattagctaggcatggtgggacctgtagtcccagctacttgggaggctgaggcaggtgaatggcctgaacgcaggaggtggagcttgcggtgagctgagattgtgccagtgcactccagcctctgtctcaaaaaaaaaaaaaaaaaaagaatagagtgggagagattactctattcaatattattgttatagtaatcaggataacgtggtatgggtgaggagatagacacacagatcaatggaacagaaaagagaatctagaaatagacccacaaaaatatactcaacttacttgtgacaaaggtgccgaagcaattcagggaagaaaagacatgcattggcaaaatattgagcctcaacctaaacttcatcatatacaaaatataaagtctatacagaaataaactctaaacttatggaggtgagtttgggttttttttttttttttttttttaagatggagtttcgctcttcttgcccaggctggactgcaatggcgcaatctcggctcacagcaacctccgcctcccgggttcaaaccattctcctacctcagcctccagagtagctgggattacaggcatgcgccaccatgcccagctaattttgtatttttagtagagacggggtttcttcatgttggttaggctggtctcgaactccggacctcaggtgatctgcccgccttggcctctcaaagtgctgggattacaggcgtgagctaccgcgcccagccgagtttggggtttaatgtaaaatgcagaactataagacttttagaaaacaatggagaaagtctgcagaatacaaggctaggcaaaaaaaaattgttggagttgacaccagaagcatgatacagaaaattgatacagaaaaaatttatgttggactccaccaaaattgaaagtttttgctttgtgaaagaccttgtttaaaggataaatagacaagatacatactgtctttgcacataatgtattcaagaaaggactgttgtctataatatataaaagaatttcaaaactctacagtaaaaaacaaatacgcaatccacttagaaaaggaacaaaagacattattagacatttcatcaaagaagatatatagatagcaaatgagcacatgaaaagatgttcaccatcattagccattggggaaatgcaaattaaaaccacagtgagatatcaccaaacatccatcatcacaacggctacaattaaaaaacagtgacaaaatataaagttcatacagaccaacaccagtgctggcaaggagctggagaaactagctatctcgtgcattgctggtggaaatgtaaaacagtacagccaccctagaaaacaatgtagcagtttcttataaaattaagcatgcaaccaccacacaacctagcaattgcactcttagacatttatcccagagaaatgaaaatgtgttcacacggaaacctgtacatacatgttcacagcagccttatgcataacagccaaaaactggaatcaatcaacccagatgtccttcaacagatgagtggaaaaacaagctggtacatttataacatggaattccactggacaataaaaagcagtgaatttggccgagtgcagtggctcacacctgtaatcccagttactcaggaggctgaggcaggacaatcgcttgaacctgggaggcagaggttgcaatgagccgagatcgcaccactgcactccagcctggacaaca[137 bp omitted]ccatctctattaaaaaaaaaaaaaaaaaaaaagaggctgggcatggtggctcacacctgtaatcccaccactttgggatgccaaggcgggcagattacctgaggtcaggagttcgagactagcatggccaacatagcaaaaccccgtatctactaaaaatacaaaagttagccaggtgtggtggcatgcacctgtaatcccagctactcaggaggctgaggcaggagaatcacttgaacccggaaggcagaggttgcagtgagccacgatcatgccactgcactccagactgggcaacagagtaagattccatctcaaaaaaaaaataatgaaattttttttttttaaaaaaaagaagcagtgaattactgattataggcaacatcttggaagaatctccaggaaatcatgatgaatgataagatccagcgccaagagggcatatactgcatggttccatttatattacatttttgaaatgacaaagttttagaaatagagaaaaaatgagtgattgcctggggttaggaatgggggaagaacaggagaagggatctatacttacggaaagacaagacagggatcatggttccgatggaattgctcaggatcttggctatagtggtatcgaaactccacatgtgataaaattgtgtataactaaatacacacacagacacacaaattagtacatctaaaactggggaaaccagaataatattgataaattagatcaatgtcaatatccagtctttgatattgtaccataattttacaaattgttattataggagaaaaatgagtcttaaaaagtcttaaacggtcttaagatcgcttaaaaagtcttaaaaagatcttacatgagatctctccatattatttcttaaaactgcatgtgattctacaattacctgaataaaaatttcaattaaaaaaattaaacatagggtcagacatggtggcttatgcctgtaatcccaacactttgagagtccaaggcgggtggataatctgagtgaggtcaggatttcgagaccagcctggccaacacagtgaaaccctgtctctaccaaaaatacaaaaattagctgggcgtggtggcacatacctgtagttccagctactcgggaggctgaggtgggagaattgcttgaacctgggaggcagaggttgtagtgaaccgagatcatgccactgcgctccagcctgggtgacaagagcaaaagtccgtctcaaaaaaaaaagagaacttatcaaactgtgctctttaatgtgtactatttattgtgcctcaataaagaaaagaataaatggatgagtatatgaatgagtaaacaaatcaagaatggatgtatacatttaaaaattgacaaaggaggctgggtgcggtggctcacacctgtaatcccagcactttaggagtctgaggtgggaggatcacttgagctcaggagtttgagaccagccagggcaacacagggagaccccatttctataaaaaatacaaaaattagccaggcacggtgatacgcacctgtagtcctgtgtggggcaggaggggtgctccaagaaggggaacaggctgagcgtctacaccagagctggcaccagggcacggatgccttgtctggaggccacccactcccataacacaattctgagaatgccgcagtcccatcctggcctctggcctcgtaatgttaacgctggatcctggtctcctatttttattcagtctatgtattatgtcctgctgaatgagtggaatatgaaaataactttttatttcccttaagacggcatatccggagctagctcctatctcaaggaaatcctttgctgggggagtctgcagcttagagggggaagcgcccttctgtggaaaagatgggcttgagaggcggcagggcactgtggggagtcccctggctttggagccgggctgcccagttgcccaacaccagagtggtcacagtcctcctaacctctctgggcctcgcaggacaaacccgcctctgttgcacaataaacccagtaatacaggccaagtacctagcacagtgtctggctcatcacaagcccttcagaccctccagattgtgatggggtagaaacctgtgaacatcgtgaatattctccctgaggaggggatatgactaagcaagttgtcgattctacctccgttgctgagagctgacagcatcccagcatcaggtttctcgtttgagcacctagctgggggtgttccggtgcagaggacctggagttcagtttgagacatgcagtctgcgatccagacaaggcattgatcgtgaggaatgagctgccgggttctccagcagagggagaggggctggggaccgaggtgtcatgagtggagtgataaccgctgtctctgtcccttccctaagctgtctccttgctgttctggtggctctgaccgccccagtggaaaaattttctccctcccagccaggacccaccaaaagcccttgggaggcactcaaatgtgcaacttttttatagttcacatttattctaccggggaaatcagccctcgaccgcagcggtgcccaggcatgaatcatcatgtccatggtgtacagaaaatgcagtaagtcagcagttacggggtggggccccagggttttcatccacaaagagatttttcaattttattaaaatcaatacgagttttattacagtataaatgaaatgaggtccccttgcttccgggataacgaaccacatcgccatgacagcggggtaggagaacccctgcctgaaagagaccctcctcgggaaggcgagtgctttgattcatgtgcccagagtggtggcgaccctgcaggagagagaagagctgcagccaaggaaacaggtctactgggaaatttccagcaacatgccaagccccccgctccgtgactccttcctgtgttcttgcaaatctttgtgaatcctagaaaaatcgtgacataacaggtgggacaaaattttccgtggaaatcacaggtagagttgatttcatcattgaggttggcttggtgctgagattgtccttctgtaggaatgaaggcaggcacagagagcaagctggtgtggaagcattccgtaaacaagtgctggtggtttttaccttattcttgtagttaccatccacagcaatgggtgctcaggtcctataaacaggctcttggggaaagaataacaagggccaccatctctaagttaatggtcaagacccaaagacagtccccatggaaaccagaacagagatgatcactgaacgcctgagagaaggcgtaagaggagtccgcccatgtgtacacacacacactgcacactcacatcacacacattgcacactcagatatatacactcacattgcacactcatgtgcacacacattgcacactcacatgcatgcacacatactgcacactcatatgcgcacacacatattggacacacattgcacactcatatgcatacacattgcacactcacatgtgcacacacatattggacactcagattgcacatcatatgcatacctacacatattgcacactcatgcacacacacatattggacactcacattgcacacacatgcatacccacacatattgcaacctcacatgtacacacacacacacacacacacacacacacacacacactcttaagcagctctctgggcgggttgtggaggggcctcagagcccagtctggagcccccggtgcagacatggggcaggaaggggtggagttcttctccggacaaggccccagggcctaggtagcttggcttccaggggtggcctagctccccaggacagctgtgggcagtcttctggctcctgcgggagcttccagtacccatcccctggccaggacttgaagggaactgagtttggatcagaacctcagactcctctagtttgagccctggaagctcgtctcctggctgtagggttgtagtctcagtcctgactgctgagatgtcctggcagccctgggaactagaccaaagctgcttaatcggggttctgcagtcatcatttatctggaggacaggttctgccacctggggcctggtgctgtagaggtggctgtctcaaaggcctcaaagctgcttcaagtactgagggagaagcttctgctggagctcttggaaagctactgggctggttgtccacattcagaggggcgtagacatgcccttgtttcataggggcaggcagagcccagacccagagaatggggcatccagagtgatccaggggacaccgatttcagccaggaaagggactttggttgagaaagtgcctgtgatgtggatcctacaaaccttggaggatttcctcccaattttttttattttatttatttaatttttagacagggtctcactctgtcccccaggctgaagtgcagtggcatgatcctggctcactgcaaccttgacctcccaggcttaagcaatcctgccacctcagcctcccgagtagttgagaccacagtgggttgccactatgcccagctaatattttaatttgtagagatggggtctcgctatgttgtccagactggtctcaaactcctgggttcaagtgatcctcctgcctccgcctcccaaagtgctggaattacaggtgagagccactctgcacagccccaacttttaaaaatgaaaacaacaataacagcaaggcatcccaaaatcccaaccctaacaaagctattttcatttttgtgtatctaattcttgtcctcgtctacagagacacacatttttcttcattggaatgataatatgtacatgatttttatctacaggtggggttttttgtctacttaacaatacataataaatatttttcatttttccatgcagttttgattaaatgtaatatctgtaaaaaaatggaatagtgaagatgtttctctgattactgagtttttgttattgaataaggctacactgaacatcttcaaagggattttttctttccagaggtaaaccaataggtaaatcccagcactttgggaggccaa[132 bp omitted]gaagcaggagaattgcttgagcccaggagacagaggctgcagtgagcagagatcatgctattacactccagcctggccgacagagggccacaggacataagtattttttgattcttattgcagattgctcacttagagtaacccattgtgcccccatccatatcccacatcccaccccctaatcttgccgtggtgacttgtgacacgtgtctgtttggaggtaggtgtttctgctactttagtaagcatcaaatagcacctcaagactgcttaattttaattgctctgattactagcaaggctaaacattttcccaggtgtttgttaacacactggatgcccctcatgtgaatagcctgcttaaatgtgttgtggggtggagggacgggggagggatagcattaggagatatacctaatgtaaatggcgagttaatgggtgcagcacaccaacatggcacatgtatacatatgtaacaaacctgcacgttgtgcacatgtaccctagaacttaaagtataataaaaaaaagtattgtctacttatctattgggtcataatactttctctctcatacattttaataaactctttaagtaacattgctatcaactcttcctgtatcaaagttggtgcaactatctttttccatctagcatttcattacattttttttttgacatatgggagtttttgttttgtttttgctgtcttctgtctgttttatcttttgtggtttcttctattgcttcaaagctgacactggtccttcttcgtagaggtaataaatattccattttctgctaacttttctatttttaaaaataaattcagctctttcatccatctgtagtctatttcagtggaagggggaagctctattaaaattcttccatactctctggtttcacaacatcatttattttaaattattattttataaaacgttctaatgtctaacaggttcggctgtgggatttactcttttttcttagactgccctttgaaatcctcatccgtttgtttttcctgaatcagttgtgttcagagaagtactgttgagattgatttggggtaggctatgtttgtgaattcacctaaggtagtgagacattttcataataccaaatgtgctcgtcttgtctctccccaccc[187 bp omitted]ggtggtgggcccctgtagtcccagatactccggaggctgaggcaggagaatggcatgaacccaggaggtgaagcttgcagtgagctgagatcgcgccactgcactccagcctgggccacagagcgagactccgtctcaaaaaaaaaaaaaagttcaggcatatgtttgttcctaagtatgttagatcacttttttgtgttgtaaatggtttttttccattatattttctagctagtgtggtgttcaggactatcaatttttatgtatgtagtttgcatttgtcctctcccttaaactctttaatttgtgaatttgtactgattcttttgtattcactatccatacaaatgttctcatgttgtcccttttttcccccaagttattttatcttgccttactaaattgactgggatgtccaaataagattaaatcgcaccactaccttaaatccttttaggaacttggtagggtttaagttaacttggtttttgtttgtttgtttgttttgagagagtctcactcttgtcacccaggctggaacgcagtggcgcaattgcagctcactgcaacctccatctcccggattcaagtgattctcctgcctcagcctcccaa[132 bp omitted]cacctcagccttctaaagtgctgggattacaggcgtgagccacggtgccgagccttaacttgttaatgaattatcagtgtgataacaggctttcttttttgttcctaattttaaagctactggtgtttcaccagtgcaatttttgcattgaaataggtatgttttatcctgttgaaaaatccttgaattcttaggttataatttttttaatgactgcattttatcgaattatatttggggtgattattaagatgagtttaacatcctccattctggccttcatttttttcaacaatcctttgtggattgaatgtggaatgaataatgaaattctcccctagtgacagagctggaattgcaacccaggtattccaattccacctcccaccttacttggcaaaattaacgtttcagaaggtatgtttccattttcaaaggcgtgaacatcgcttattgctggaggatccgcaaacacagggagataaatgatgtgttttcgatagaatttcctgtgttgaacccttttcagggcacccaggttttaattggaattagcaaaataggccatacccaagcttctccaagagtgactattaaactttaaaaa[144 bp omitted]acaatgattgaaacctcactttgaaaggggaactagatgattttgactaatagttaactgagacctaagtacctgagccaaagtaaaacactctttggatattcatttccagatcctccccacagccgccaccgcaaagcagcggagctccttccccggtccctccgggcttgctgtccgctctccctgccggctgatccatgcatcctcctctgtgtaccccgcagcagtcggcccccgtcggtgctttctctcctggatgcttgctttctggggcactgggggagacttttattctgctccaattagccagaacagttactgcttctgtgggattcaagctgaaaacagagcccacgctgcacagcaccgcgcctcctccggcaaaagcgatgttcaggcgctctgcgagcagcacccgtggggagctcagtgaccttctcgctcccatcatcccttgggccacagtttctaaagcagccccacaaacactcacctgatttcggcgtcagacctatgaggcaggtagggaggggttcttcctaacatcctcatcttacaaatggaaacggaggcacagggagggtgagtaaactgcctaaaattcacgcagctagaaagtgtaaatgccgatagaattccaaatctgtgtctttttatttttatgagacagagtctccctctgttacccaggctggggtgcagtgctgcaatctcggctcactgcaacctccgccttccgggttcaagcgattctcctgcctcagcctcctgagtagctgggattacaggcgcacaccaccacgcccggctaatttttgtgtttttagcagagacagggtttcaccatattggtcaggctggtctcgaactcctcacctcaggtgatccacctgcctaaacctcccaaagtgctgagattacaggtgtgagccactgcgccctgcctgaaatctgagtctttcctaccacaccacactgtcttcatgcaagataatctgttctcctttcaagcttgaaatacagaattcagatgtctgcaattgaaggagttaagtgcgcatttgtttaaataacttgaagcttccaggcatgcgggaatttgcatgggctgctgcaggctgggtgggggacagggaatcccttgctgtcccagcttttttaattctcacagagtggattgttcattctgatcctcttggtgacccacatgctgagcagagcggtgggtgggtgggcagaggggagaggagagggggccacctaggcttgccttggcagagggctttggttctacgggtgaaaacttggttttggcagcttgtttgcgctactcctagcgtgctcaggggaagtcaggaggttttgtgcatgttccaatgcctgtgggatgtaagaaaaagattctgggtccaactccagctccaggcacccaagggcaagctctgcctggagggaaagttgggcttatctgccaggccaggtgaggaggggctggaaagcaggaaagaagctagctgaactcattctgagtcaagaggaaacagacgtgagccaccctggaaggctgtaagggacgctttttttttttttttttttgagacagaatttcactcttgttgcccaggctggagtgcaatggcaagatctcggctcactgcaacctccgcctcccgggttcaagcgattctcctgcctcagcctcccgtgtagctgggactacaggtgcgtgccaccacgcccggctaattttttgtatttttagtagagatggggtttcaccatataggccagatggtctcgatctcctgacctcgtgatccgcccacctcggcctcccaaagtgcagggattacaggcgtgagccatcgctcctggcctcgcgccttagaaaaatcattctttaatcccacctttccctctagccaccagcccatctccctgcctcccccctcaccccaacaatagaacttaaaatagctgtaccctggcagtcctcactccgtcacctcctactcaccctctgacccaccctggtctggctctgcccccacctccactggaactgcatctgtccttgaccatgtgtccactgttgcccaccgctgacctctgctttgcttggccaaacttttctcagacttctctcttgcctgtgggcctctaaactctgctctcccccaagcctgggcatgcacaagaaagtagaaatcaccccgcaccaaccaacctctcctgggaattattgaccagagtggacatttcccagacccactgggcatgagctcttgtgtgtccagcttcccctcggaatattctgcctctctctgcttgctcctgctttgctcagtgaaagatacccttctgtttgatcatgaggcacttgcagatttctgagctcagagtgtcctccctattgcaacagtcttcctttctatttggcatcatgatcagcaagtcacacccatattttcaaatccagtggccacttcggtgcacacctaactcctcctctcaatggcatttagcgcgtttctgtcctactgaaaacactttcctcctcacctgccatcaccctgtcctctggcctttctcctgccacgttcgtctccttgcttttccccttccaaagtttgactctttgcaccttgtcctgggccctctctgctttctctctgcagggggtcccatccctccccattgtcttgatgggcatctgtatgttgacggccctctaaggacgttgtcacccttctgagctcccaattcacgtacctgaggtcggcctgatgtttccacttgcttatctaatggacacacccaacccgaaaggaactcttcacttgtaaccttaaactggttattctccaggatgatggattcacacctgcctcggccatgcaccccatcacaaaaccagaagcctaggagtgctcctgtcatcttgatttttctctcacatcagtgattccaaaataaggacttaacctgtgtgcttctcttcttctcgctgtccccacccaccagagtctcccacctggactgttaccattgcctcctaactgaccttcctacttgcatgcctgtcatcatctgcccattttcaacatgccttccagaagacaaaatctatacttatcagctgaagtttgcataaaatgctccagtgccttccacttgcacccaggattcaatccaaagcccctcccagggctgcccaggctgtttccccaacctccttagggccatctcctcctggctcctaccctccttggcccactgctgcccccggatcacacccagctcctcccaggacctcagccctggctgctccagaccttccacttggtcccttgccttctgtcagttcccaaaggtcatcttcccagagagaccctccctgaccctgggtaaactgcgtctccctatgctgctccagccagcaccctgttgactcccctcacaatgctaacaagcatctgcattccatttgcatttgtggttgtttgcttgtttgttctgtctcccccactagacattccaggaaggtgaggccatgccttgccagtacctacttaacattcaatgaatgaatgaatgaatgaatgaatgaatgaacgaacgaacgagtgaactcagggtggtgcttcacctgctggtttacacgcctgtctctgcccacccaccctggtagagtctcttaagggagggaccccctctgactacctctgttcttagtgggcctgaagaacagaggccaccggagagtgaagtcagggtattaatgagacaggacaagcggctcctgcagcaggccttgtcatgcatgaaggacaacagggcaggggtcctcatccacagcttcaagcctcctggccacgtgcagacccctctctcaggagctgggatggctgcagaccacagcatctctcagccacccctgtgcctaacgcccattggcaactgcagcacagggcttagcaagaggcaggagtgctgccttgcctggagaagcccccattctgggcacctgggcactccaacgggacatgcaggccagaggccagctggcgggcctcactggccctgggccacaaggccagccttttataaaatgtgagacacagctctgggccagcactggagcccttctggctcaggggacaaatcccagctgtcaccctctgcagagcagtgccctggaacaagcctgttggggaatccctcgcctagactgcaatggtagcaaaacactagcacccaccacatcagccaaggctccagggtcatccaagctgtgcaatttaacagacagaaggtgactttgattgagaaccagctgtgtatagtgcctgatcctgtgctgggggtatgggagtccagagacaaaataataataaccccttctgcttttaaaggaccaaagactcaacctctaggctatgcttccccttcacaccaagtggaatcgaatgagctcaggatgaacgggagagatgaagctgggatttgtagagggctgaaatggaccggagggtgggtcattgttaaagctctgccgggacctatcaggcctctttatgcacagcgcatcctccccagctcctttctctgtgcttttttcttcaatcacctgcacctgtgactcttgagacccgctctctggctactgaagccacagccctgcccgcataggaagagacagtgcccaaaaatttctggcacttgtcagggcagcccatagccaatccctggtgcaggaataagaatgcccaactgtggagcaagggcaaactgtgcgtaatttatgtgccagagatcctcacaggatcagcccaagaagccgggagttcacttgggatctgactcttgcccggcttcttccctccctgtcccacctccccgacacccagttaattctatactggactttcttcctttccattcattgatttcacaactcagtccaggatcaacaattcagtcctcgtgaatgctctccccaaccctcccaacaggtcccagcctctcctggcccaccccacaggaaaaggagaggatccactgctatggctgagcaatcagcggttggtagtagggggaggttccccacctggacttggtcccctctgctggcagccactgctgatagagtggctgttgtcacttgtcacctgctgctgcagcccaggcagggcacaagactgctctgaggaggaagagccatgatttcctcattgactcagaccctatctcagttcttaccaccatgtctgactcctcagtagggtagccaagcctcatgaccacctcttggtggggaagcactgtgctgtgtctctctgatccagcatctccatgccccaggccatggggatgccaacaagcctgtgactgttcactgtcagaaaccccagctcctgaaacccagggctgcagcaatgttaggaaggaacactttctgctgccactcaagaatggggtgggcccatgggcatttgtgctgtctgctgagcccttcactgtcagccctgctgcctcccagtgccgtggccaaagagcgtcgatgaggtgctgttcttgcaaaggaccctttcaacaataaactggaatatggcatctgcaccaggccaatggctcagagtcacagattacatttatttctagaaatagagacaattcctctgttggacatctaagcgtgtgacaacacaagtagtacgcattccggaagaacttggggaatgatctatttaatgtcaatttcccctactggaccattaacctcacaaggatagagacactgtcaatcctattcacccctccatccctgttatagagggcaggagacatagatagcaggatagatatctctgtgatagatagcaggagttgcctacatgtttacttaatgagtaaatggacaaccactggaggagggatgggagggggcttatgcatcaaactagataggcttgaaggtccctcaaggcttgaaggccacatgatgctcagtcagagctgggcatcccctggagggagaggccttgcagaagacaccatctaacccacagaggtgaggatcaggagcagtgtagacattcttctgccctattttctcctttttgattagcaatgaaaatgttgaccttactgggcaaaactcctcaagggtcagacccagaagaaactttggagagttgatactctcaccaattgtgctgatgggaggactgagaccctgagaccaagagggcagagactcttccaaaggcaatcagggtgtcagtgacagagtcaggactaggtctcatgtttcctgcccccagcccggctgacgctccttccaggattccattctccctggacacatttgcagatgagagcacagaggtgccaaggtcaggtggggaagctgcaggcagagacgactcctgcctctccaggggacagcctcagaagggttgagttccaggcttccttgtctcccccgagcccccatccctgctttgttcgtgccattagccattctaattaatgagcaaacattctttgcaaaacaatgtttaaacaccttagcattaatttaatcaaatatttaattgccctgtaattaatcatctaagcttaatgaattgagcctccatctctgggagttgggtttgtcccaatgacttctgaaaataagtctgtgatggggcctcttggaaccagacttcctgctcccatttggagctgctgggtgatggggtccaccccttcatagcctgtaggaggtctcctgctctctgtccccagcgaacagcctgagatcagctctcgggggctgaggagccaaaacactcactgggagaggcttgttggttaagagtcagagcctggggccaagtctctccagagcggggaaggctgaataagctgggcagctgcaagacaggtctcactgtcctagctgtgtgccctcgggcaaatcacaccccctctgcaagtctcagcatcttcctctgtgaaatgccagtctccctgggctctggagagattcaaaaaagatctccaaagggggtaaagaggctttgtagactgtaaagttctatgcaccagtgaggaggtgcttgaacccccctctccactgtcttcagagtcctggaagcatggagcccaggaggcagtttgagagatgaccctgcccagaaggctcagcccactgcctgtcacagtgcaggctggcagtggcccaccatcagcagagcatctgaggagctgaaggttgaccccttgcccatgctggggcatggaaaatcccagtcaagctggcaggagcctcagagccccagcaatggggtccctgtgcacctacttcttagccctgcccttcccctaggatgctggaaggaaggccagggcatccatgagctgctgcagatgcttcccaagaaaccaggacagatgaggtcccccgaggatagagatctaataatagctaatacttagtgagcacttctgatgtgccaggccctgccccaagaccttacatgaggtcgctcattaagtccatacaataagccctgtcattgggtagggtcagcctagattgttgtcctcattattacccacctatcttacaaatgaagaagtggaggatccgaggactaggcaacgtgctcaaagtctcagagcaagtaagagatgaagccagcgtctgaactaaagcagtctggctgcaggagtatgttgtaaaccctgtgcatcccatctcttggaggagatggaggctctgatggggctggagcaggtcagccattggctgaagggccacacgcacagaacagacagatgagcagcactcctctgacagggcctctgccgcctgcagtgggaggatgaagcagcctctcccaggagcctggtggaaccaccagatgcagtgtcagccaccttaactcactcacgagctggctgagtttccatctgcctctgagccaaggagaacatcagagggcagatttttttttttttttttgatggagtcttgctctgtcacccaggctggagttcagtggtgtgatctcagctcactgcaacctctgcctcttgggttcaagcgatgctcctgcctcagcctcctgagtagctgggactacaggcgcccgccactacgcctggctaatttttgtgtttttagtagagacggggtttcaccatgttggccaggctggtctcaaactcctgacctcatgatccgcctgcctcagcctcccaacatgctgggattacgggcgtgagccaccgcactcaccccagagggcagattcttaacttcccactgttgccttcttctgacctagactttgtcttcttctgaaggcacctagactttctggagtggcatctgttagaaggaaattagcccatagacagacacaacctctgacctaacatctgagccttcagctacactccaagcagaggattgattaactccagcctgacttaggagctgccagggcgcatgcttcccctggagttatttatgccaccccattagctcaggaaaggcaggattcatagagccatcgtggcctaggaactcagcaagattaatataactgggactgaaatacacatgaggccagtgccacctccatttaattaggaatgaagggaaggaaggggagtgccagggtctgggttagaggggacagacctcctatcacatgggtcccgcatttattccgtgctctccatccacacggcccgtccccccatctagttcacattatctcagtaagtccttgcctcagctcctttccctgggctcccagcctctgggctcacccaaccctgacaccctctatgaagtttcaggacttggggcagagcaacagaggctcattgagccaatggatgaatgcagagatggagccaccctttcctttttcaacagctctttgaaaactcctttctaataaatgccttcacagcagagcaatacgagcctggtggtgtgctccaactttgccagatctctgcatcagctcagggcacgggatatgagctgcttgtgctgctcctttccaagtcaaaggtttgcattagtttgctggggcttctgcgtcaaagcaccacagcgcatggcttaaacaacatgcatttatctcacagttctggaggctagaagtctccagtctaggtgtcatctgggttggtcccgtctgagggctatgaaggatgggtctgttccaggcctctctccttaacatgtaggtagacaccagtcataccagattagggctcaccctaataatctcattttaacttgataacatttataaagaccctatctccaaataaagtcacattctgaggtactagtggttagggttccaacacatatacatatataaacacacacacacacgcacatacacacacacacatacatatatacacacacatatacatatatgtacacacacacatatacatacacatacacatacacatatatatttgtggcacaataggctttaaattccattctggttgtgttccttgtctgcatagctccttccagaagcactcgggcaggaggggtgggtgtcagggcaggatcaagcttcctgttccccagccgtaatgcatcaaaaatggcaccacagcctcaactcccctccagacaagccaggaacaaggagctttggatgcaggaactttcagccaactgaccttctgattctccatggcaagtgtcacctcgcaccagcctccccctctttcgaccaaaaggctggactctaaatcctctagactttttattcccacgctggaattcacgaactcattcatttgttcacttattcaacaacgctttactgagcaagcgctccataacaggtccagtgtgctaccccaggacacaacagtgaacaaggtgtagcctctgccttcaaggggctcccagccttgctgtggacgcaaacaggaaaatggacaattccgacatgataaggcctaagacagggggaagcagaaggtgatgctttcagatgctccagaccagaccctggaaaaaccctaatctttaaaccagggataagcaaactatggcctgcctgtctgtcttcgtttacaaagacagcctacttcccgtctttgtaaataaagttttattgacacagagccacacccacccatcatttacattttgactatggcttctttttgcatgacaaggacaaagatgagtatttgtgacagagattgcatagcctgcaaacctaaattatttactgtctgacctgttacagaaaaggtgtgcctgcccttgatgtaaaccatgagaactgcaaagctgtagttgcctccaaggattttatgtcgtgatcgtgaccaaagatgcccaggggaccatccagtggggagatgtgaagtatgtcctggccgggttctggtctggtttttgttgctgggtgagttttggtaagcagctttttctctctgagcctcagtttccctatctgaaaggggaaacaagtggagtaagtgattttataattcccatcagctgggagccactgggtttgggtttaagcagttctttatcctgtcggaggctctgtgaccctacaaaagctctgtgacccccgcaggtgagctttgtggtctcagagaggccttgtgattactctagcgagcccagagaaggaggccatgagaattattagggcaaccgaggcccgggcatgccaaattatttcccctggtgatgcccttttgcacagaatttagcactggaaatgaagaccatatgtgcccagcaacaaaacatcccaatgaaaaatggaaaacgaaggcgctgctttgtctattaaatgccaaacatccaggactttccgcataagcagatgctgatcaccaccctgtaggagagcggctcatagagtagaaagcgtgcaggtctgagttcgggcgcggtgactcatgcctgtcatcccagcactttgggaggctgaggcaggtggatcacttgaggttaggagttcgagaccagcctggccaacatggtgaaatcacatctctcctaaaaatacaaaaattagccgtgtgttatggtgcgtgcctgtagtgccagctacttgggaggctgaagcaggagaatcacttgaacccgggaggcggaggttgcagtgagatgagatcaagccactgcactccagcctgggcgacagagtgaggcgctgttgaaagaaagaaaggaagaaagaaagaaagaaagagagaaagagaaagagaaagaaagaaagagcgagcaggagtgagactcaggagactgttcttccagaaggctctgccacgagtagccagaggtcacctcagtcaagtcatcaccctctttgtatcacagtgttctcaccttcaatgaggatgatgataatctccacttgggggcattgggaagactaaatgagatgatgggtaaaaacatagtctgcaacatgtagaacattccctaaaatattattactagcttgtcttcacgtttgcacagaaattcatcatttgtacagttttcacacagaccaactcatttgacaagaaagcagaacccagagaattttaatgacttaccccaggacacacagataataaatggtcgagttgggactcaaatccagagcttctgatcccactttcaaagctctttccccctcagcatgctgctctttcctcttgttaatcttgttcacatgtccccattgtccctcagtgacttgttacagctggtgctcattaaatgtgtgcagatggagaaatcagttatagtttttagttcttcctgctgctccctgtggagaggtcatcctccctctgcctccctccccagagccatcgcatcctgaattccacctttcgggccctttggccttctgaacttcccttgtcatccaccgtgaggccttccactgtagcttcctggcaagaatgagcactgcctgaactgggaggtggcaaggcaaggggcgaatcacagagattatgttcctgggaggctgcactgccccatacacacaggtggcaaacatttaaaggaagactttaactatatggtgaaggagccctatagttatggttgtgagaagcaatatttttcctcctggtcctcgctaggcttcctcctcttccttttttttctatttttatttattttattttattttatttttggctggagtgcagttgcatgatctcagctcactgtaacctccacctcccaggttcaagtgatcttcctgcctcagcctcctgagtagctggggctacaggtgcgcgccaccatgcccagcttatttttgtatttttagtagagatgggttttcaccatgttggaaaggatggtctcgatctcttgaccttgtgatccacctgcctcggcctcccaaagtgttgggatcattggcatgagccaccgcgcctggcccctcctcttcctttctagccctgggctccaaacttttgccctcacagatgctccttctagactggccaagtgtaggtatttcccggggtggaagggagggggcagaaagaagagtaacgggaccacccggacgccatggacagagaacccacggagccggtggtatccatgatgtggagtccagggacgccctgggcaaagcaagccctgaggaatgaagctgctctccctgtgtggggctcctgcagcgggtagagcatcactgggaggtgcaaatgctcagaaatagaagaaaactgtggggcctcggagcaagagctcccttgttctttctgccagtctttttgtccctgagctctagagattcagagacgagtaagaccacgtctcaaaatcgagtgggaaggcagagacgaaagctaaacttatcatttacaaggtagagaaataaagaaccacatcatggccagatgagaacaaagcctgagggagaataaaaccactttgggcatgcgaagccttggaaacaggagctcctgggcaccctctccaaacaagttacttcaagacatatgtcggtaaaatgaggaaaacatcaaaaaaataaaaagaaagaaagaaagaaaaagaaataaagaaagaaagagaaagaaagaaagaggaagatatagaataaacaaactggtataaaaaatccaggggtcaaatgagaaaaaaatacttcagacttgtgtaccatatctagacagcagtcagtttgtagagccagaacctatgagttccaagggggaaaaaaaataaatcaaggagagagaaggcattctaagcaatgtttgtaacataaacaacaaagaattttgacatctgtaataagcaaagaactcccatacatcaataaggaaaagagaactaggcaggggttataaaaggcaatctcaccaggcgcagtggctcacgcctgtaatcccaacactttgggaggttgaggtgggtggatcacctgaggttaggagttcgagaccagcctggccaacatggtgaaaccccatctctactaaaaatacaaaaattagccaggtgtggtggcaggtgcctgtaatcccagctactcgagaggctgaggagggagaatcgcttttttctctacctttatttctttatttctaccaggaggcagaagcttcagtgagccaagattgcatcactgcattccagcctgggcaacagagtgagacagcatctcaaaaaataataataataattgtaattgccatgagactacagaaaaagttaacatgtataaaaattaca[132 bp omitted]tctactaaaaatacaaaaaattagctgggcgtggtggcacacgtctgtaatcccagctacttgggaggctgatgcagaggaatcgcttgaacccgggaggcggagattgcagtgagcagaggtcgtgccactgcactccagcctgggtgacagagtaagactccgtctaaaaaaaaaaagaaacaggccgggcgctgtggctcacggctgtaatcccagcactttgaggggcc[134 bp omitted]gaggcaggagaatggtgtgaaccccggcgggtggagcctgaagtgagccaagattgcaccactgcactccagcctgggcgacagcgagactccgtctcaaaaaaaaaaaaaaaagaaaagaaacagaaataaaagaaaaagaaatctacccgcagcacagggaactacaaatggtcaatggcacaggacacattgttcaatctctttagtaagcagagagatacaccctaaagcaatgacaagggtccactacccacctattagttttcaaatgttgtaacataaagtgctggtcagggcgtggagagacggccacttctctcctcacttgcggtgggagtatatacatgggtacaggctttttgaaggacaatctgtcagtatctgatgaaagtttaaacagcttggctctgtttaaagggagagaggaggacaaggattgttcccctcaccttccaatctcctgcctgtgcccaactttggtggacaccagttgcaatggagccgggaaacccagtggaccaggctcggcctccctggcagccttccctgccaggaagaagggagcaagggcagggaacagatgtgacaataaacccacacaggaccagctcagctgtgttcctttgtttgtggtttttacacacaccattcatgttacctgtagagcgtagtctggtgtgtgattagaccacagttggtggggatgtaaattagttcggcctctgttgaaagcagtttggagatgtctcaagtaacttaaaacagaactaccatttgacccagcaatcccatgactgggtgtatatccaaaagaaaataaatcattctaccaaaaagacacgtgcactcgtatgttcattgcaatgctattcacaatagcaaagacatggaatcaatccaggtgcccaaccacagtgggttaaactttgaaaatgtagtgcatatccaccatggaatactacacagccataaaaaagaataaaatcatgtcctttggagcaacgtggatgcagctggaggccattatcctaagccagttaatgcagaaacagagagccaaatactgcccattctcactattagtaggagctaaacatttggtacccgcagacacaaagatgggaacaataaatgctggggtaggtagggaggaggacaagggttgaaaaactatcagacactatgttcgttacttgggtgatgggatccttggaagcccaaacctcagcatcacacaatatacccatgtaacaagcctacacatgtacaccctgaatctaaatatttttgaaattaaaaaaaaatagaccacagcctatgtatccattttcctgtttctgaacaccgagactcacctctagctttgtggaatttcaaagtgttttacaaaatatgactgtacaccattccctgtgtacacaaatacaatgctctctaggacagatggcgtagacacgggattgctgggttgaggagatggaaaggtaaggcaaaggaagtgccatggtattgcgttcatgctgtctgccttggacagaatctgtagaaatggctgattccctttgtctgtggctccactttctatcagacatccccttccacaggctctgctcccaccaggtgaccctggctcctgggctccagtcacaccggctccttcctttgtccacagctctggggtggagcggctctctcccttctctgggccatctcgccttccctgtcgccctttcagctccttgcacaccttggtagcttgctccctgtattagcgttttcctgttaatatccatctggcatggattttgttttcctggatgaacactgactcatacataggccacagtcaggagtttggagggcaaccaagtgccaagaattttatgcagaagagtgtcatgatttagtatctgacctaaacccatgatgttggccatggtgtggaggttaaattgaacaaaagcatggaattctgtgaggaggttgatctagcagaggcttgcacaagggtaatagcagggaacagagacaaacagagggctttgcagtattttacagtgatagatgtgggggtgagaggaggacacgagtaaggaatgaagcccagatttctgggtagtggcgctgccatttactgaggtaggaaaggaagggttttgttttgttttgttttgttttgttgtacatggagtgctgagaatatatgagtttttctttactaaacaccttctctctctctttttttttagacagagtttccgctcttgttgcccaggctggagggcaatggcacaatctcagcttattgcaacctccacctcctgggttcaagagattctcctgcttcagcctcccaagtagctgagattacaggcacctgccaccacggccagctactttttgtattttattagagacggggcttcaccatattggtcaggctggtctcgaactcctgacctcaggtgatccttcttcgtgtaggtgccctcctgtcttatctcctacagcttctggggctgcagggggacataaataccacatgtgcaggcacctttgtaaactatgcagcagtttccttaaaaaacaaaacaaaacaagaaacacagtgaccacagaggggagctgggaaggagagtgaggggcaagggcatttctggggcccgtctctcctctctgtggctccaagggcaagattcccatcactagctaatgcaaataactgcatgacagcacggaacaccaccagctgccccgtggcgtgcctactaggtatcaggccctatgctgggtattttatacacattctctctgatcctctgaagtgggagccagcaatcttaatttgattttcagagtcagaactggtggaaattcactttggtttctcgtatggctggatctcgtatttctaaaggcccatgccgggtggactattacatcatgttgacaatataaattagactgattagaggctgacaatatcattaggaatgacatactatttagtagctggcattattgtctgtaacatttatacatgacaaagtgctttctatctctgcccagtgacactttgacaccaacccaaatcatagaaaatgctgtggtgtgagccataggccaattattaactgtccctgggaggtccctcagcccttccagccctgctgacaaattggtctttggtgaaattaagaagtcttgggagaagcttatttttctattcttgggaacccagggatctccccagctcccagctcccaggtagagaagccatcactgtacatgggaaaaaaataaaaaagaacactcagcactaaaagcctaggttctatctctgattaccttcatgccattagtaagtcatttattctctctaagcttgtttcctcatctaaaaaaagagaaacaaaaatacttaacctatctctactatggaagttttctgcagatagaatgagccagtggatatgaacagactttgtgtcagtcaacctttgctgtataacaaacaaccacaaaaaaatcccagagtcaataagcatgtatttacttcacgtatctgggggttggtgaagacttgtctgatctaggctagactggctgagtggctttgctttaggctatgggtttggttagaatgggttccttgccatacattgggctctggtgtgttccttgtatgtttatcctggagcctgggatacaggggaagcatctgctggtgagaagctcttctcgtggcgatggcagaggtgcaagcgggtgagcccagctgcacaagcacatttcacgtccttgtttgcgtcatgtatgttaatcttccaaagtaggtcacatagccaagccccaagccaaggagtaagcaaaaaaactcccatgtatgtggagaagagggagggaacgtttttaaacaataataccacctccttgttccatacatacataagaaaggactgttgcttatcattattttttcaacaccagtaaggacagagatgtcaaatatcccgtttttcatctattgttttggcctcacagcaactggtctggctgtagttaatcaatccaactgaccatcaatccactggacaaattgacttttcggttgtgtccaatgaagttgatttccacaggtgcattgggccccctgagtcctctctgtgctacgtgatgggttagaaagtagccaactttggccgggcacggtggctcacccctgtaatccccgcactttgggaggccgaggtgggcggatcaagaggttagggagcagcctgaccaacgtggtgaaaccccatctctactaaaaatacaaaaattagcttggcgtggtgacacgtgcctgtaatcccagctactcaggaggctgaggcaggagaatcgctggaacccaggaggcggaggttgtagtgagctgagatcgcaccactgcactctagcctgggcgacaaagcaagactctgtctcaaaaaaaaaaaaaaaaaggaaagaaagaaagtagctaactttagctacctacctctttgccaaaggtagggtactccagggagcttcctttcttattcctgatttctcccagttcaacgtcctcaggctagaagctacatacataataaccaccgacatgtatgcagacctttactgatagccaagtgcttttatagatgtaatccattttgcatccctaagatagcccctcatcatgcccatttcacagataagaaccccctgggtcacatcaatagggagtgggagacccaggatttgaacctctcctgcctgattctggggcttgggatcgcccctcccccagtccaaagaggggtttcctgccctccaagtcttgatctcctcctgcctgacttcacagcactccccaatgtaatgtcagctccgtgtgacggcctatctaccacatccacaatggtttaatttctgccgtttatgtgaaaagaaattactcactaaaatttaatttggtaaatttcagtctttgtaagcagtgaattcaatgacgacacagttcagcaagtcagcagttactcaggcaatttccgagccaccagcccccaaccctaataacaaagaaggcccagcctctcagcctgttttaaattcacattccttcattattatgtcaagggaagtcattatgggactgaagaaaatgcttcctgtctagaaaagtaaaacgcagtcttgtgcggcggattagcgtgttctgtcgggtattaaatggggaactctcgaggagcatgatttctgaattacgtggtttgatgattatttaaccacgttggctggtgataactatttatctagtccagagcaacgcagttcaataggcctgtccttacgtcccccttggaggctgctgccaggaacctggctcccagaattttctggggaagggcagtgagggggtggggaggtgacgggagatgaaggcaagtttctcaggttggcactgatgcctggaatctgcacatatttgcctactttgactggacgctggtagatttcctgcaactgatacgcgtgtgtgtgtgtgtgtgtgtgtgtgtgtgtgtgtaaaagacagagagagacagagagagagattgagagattcaagctaggcatgttaatcaggttgtttaagccaatggggctatgggctttcaaggcaggaacaatattctgtttacctttgcacctccagtgccgagcacagtgcctgacacttatgtataaccatgattttgaggctgattgtcaaaaacacgagttaggttgcagactccaatgatggtagatgcagctggcccccaggatgggagcttcaccttgacttctgtctgttaaatttactgctgcatcctcagctccaaggccagtgcctggcaaagagatagtgctcagtaaatacttgctgcattttgtctgaatttgcatcgaggtgtggaaggtaagaagagttgctaggacgaaagaaaccggggcatcttttgggaaaggggccaggatagaggagcagatgggggctgaaatacagggtggaaaagttgttttgtctgaagaagagcaggctcggggtcaggaccatgcctttccacctctgaatgccaccctggagcaggactggccccatcctgggtggcctgcagggagaggaggctgttgctggtaggcacattttgaggtggggggaaaggaaaaagtttgtaagagagctgtccagagaaggcatgactttcccttaagagttagcgagtctccaggtgtcaggagaggcttgactttgggagaatgttggagtggaaagtgtaacagagggatgtctggtcttttggcttccctgggtcacactgtaagaagaatcattttgggctgcacatgtcgtatattaacactgacgatagctgatgagctaaaaaaaatcacacaaaaaagaaatcacaaaaaaaatctcataatgggcctgatgcagtggctcatgcctgtaatctcagcactttgggaggccaaggtgggcggatcacgaggtcaggagtttgagaccagcctggccaacatgatgaaacggcatctctgtattttgtaaaaatacaaaaaattagctgggcatggtggcgggcgcctgtaatcccagctacttgggaggctgaggcaggagaatcgcttgaacccgggaggcggaggttgcagtgagctgagatcacagcactgcactccagcctgggcaacagtgtgagactctgtctcaaaaaaaaaaaaatctcatgatgttttaagagacttaacaaatgtgtgttgggtcacattcaaagccatctggactgcaggcctcaggttgggcaagcttaatatagcataagatagaaggtagaagtaggggacctttgaggtcccatgagtgtctgcaacttatagtccatatttgattgatttgcttctgctgaatcagagaaagatgaatctattcccctggattaaggagggatgttgaattggaccttgaagacactgagatggaggtaactgtggtcagaagagttgctatggatgggaccatgtgtgaataatcccatgttgtatggcttggtagagtaacatgtgccataggcacacgacagatgagggagaggagatcagagctactgcagtctgaagacccctggagaagggcaggaggccagagaaatcagggagacctccctgaaagaggtcaggtggacatattggagtgctcaggaagccctggggaggtgagactgaaggaattgtgagtaactagccaaagttgtggaatgagggatccggctcttactagcagagagtggttaaagacagaccagggaccaggcacggtggctcacacctatattcccagcactttgggaggccgaggcaggtggatcatgaggtcaggagttcgagactagcttggccaagatggcaaaacgccgtctctactaaaaatacaaaaattatctgggcgtggtggcaggtgcctgtaatcccagctactcaggaggctgaggcaggagaattgcttgaacccgggaggcggaggttgcagtgagccgagatcacgccgctgcactccagcctgggtgacatagcaagactccatctcaaaaaaaaaaaacaggagacaatgaagccgcaggtgagccaggtagttacaaaagaatgcgatctctcagcaaggggaagacccaaggctggggagaaagtagcacctggctggcttcttgaggaagcgttgccagcaaggagctctcacatcttagcagcgaccaaggtagtaggccatgaactgtaatagaggcagagggtttgttaagattttagaagcagacagtcctggtttgaagtcctgactcgactatgttccgaatgtgtgatcttggacaaatggcttaacctctgagccttagtttcctcatctgtaaaataagtcttaaaaaaaatctctccaaccctccaagagctggtgtgaagattagatggggtcatggatgtcagcatgatatgtaaactctgaagtgccctgtgcttatggaggtggccactaatggcatagtatggcagaatctctgaattagagagtgacgggaactgcctggggctccgagtcaggtcttgaacttaccatcaagctggagaaaacttccttcttcaatttaggggttgaactgataggcctggcagtggtcccacctttgagcggctgtcctggaaacaaatacatgcgaggatgtcggctcttcttccattctgcaagtcagtgtcaggtcagtgttgggaagtggtgacctgcagctgtccacctccagctgcctgcagaaggcagactgatcagaaagttcttccgtggcattagaatggagagacttaggcatgctaaatgctgaagggaagaaccatggagaggagggggtggtgacttgcagctggctgacaacccctccctgatggacgccatgaagccggtgtgtccatgactcccgtgaccttgttcccagcctcccttaccacgtcacagtgaagtcatttttcaaagctaacacttgtagaggctcctccaggaggcagttgctgatgactttgaattcaacgtgtggatttggatcttcagccctgaccccttctctaaaccccaattcgatatatctaacctgcctacttgatatcatcatgtagataagggtctcaaagtatgacccaaacagggttcccagaaacctgcttccccaaatttgttcctctttgagtcctctcctgccactgccgtccacccaactcttcaggccaagaccccccccatgtcatccgtgactgctctccttcctttatccctccatcgaccccagaaggccctgccagcccttccaaatatatccccagtctgccttcttttctccaggtcccatgttgccactctgtccataccaacatcctctctcagctggtgatgcagcagcctcttactgagcaacctgcttcctctcttggcttttcaaatccattccctgcaaagtagccagaaggatcttttcaaaacataagtcatgttcatcttcttaaagcccttattctcaaggcacataaaataaaaacaaaactgagtggaagccacactgcatgggggtcgaggtgtgaataggattttaggacaggacaatgaagaatctagaaacgcttgcaagagacatggctgggaaaggaaagacagggagagagagtcagagctgcaagcagcagactgatcagaaagtgcttccgtggtgttagaatggagaggcttaggcatgctagacgctgaagggaaggacagtggaggggaggggtggtgattcgcttggtaacagacgactcctgtttttgggaggagagacttgaagctaattcatattgttcacagtggcatttcttcccccagataagcttgtttttgtcagttctctttaaacaataaataaaataaaggtgggaattgaacaatgagaacacttggacacagggtggggaacatcacacaccggggcctgttgtggggtggggggaggggggaggggggagggatagcattaggagatatttctaatgtaaatgacaagttagtgggtgcagcacaccaacatggcacatgtatacatatgtaacaaacctgcacgttgtgcacatgtaccctagaacgtaaagtatcataataaaaaaaagaaaataaataaaataagagcctccttactaaggcccacaagaccctccaagatctggcccctgcccagtctccagccccagcctgtgctatctcccaccgcctactggccaccaagttgtgtgctttagcctgcataagaattatccagagagtttgttgaagcacgaattcctattcttcctgctcctcaccttccccctcctttgccttctcctatgcccttccttcctgacattcagtcctaaagccgttaggtgtagcacgggaagagaagcctctgcagtgaagggagggcagccatcatggcccagagctgaggccaggacagtgatggtactgggaggctccccagcaaagggtgtcagggcatcaacagggtgaggaggtcatctatgtggtgggaggaagacggtgtggaatatcagcacctacgcagggggaggagggtgccactgcagaggcatcctggcagaggtgacagcaccagactggctgaggacattcctacgaggggtgagtggcctgatgcatgtcagatcctgagccccgtgatgggggcagccctgtttggggagcccaagcccaagtgagagagatggtcatccctgcagatgagtgactggtgggggtgtcagagctcaggtagggaaacagcagcatccacacagggtcagagcccaagcaggaaaagagagtcctgtgtggggaagaaggaggcagtgagatggaagttcgatcacactgaggaggattgttaagtaaacactaagggtaacagaagccaggtgttgtgggtggaattgcatccttctgaaaatttacatgttaaaattctaaaccccagtacctcaaaatgtgagcttacttggaaatagggtcattgaagatgcttttttttttttttttttttttgagagggagtctcactctgttgccaggctagagtgcagtggcgcgatctcagctcatcgtaacctctgcctcccaggttcacgcaattctcctgcctcagcttcccgagtagctgggactacaggtgtgcaccaccactcccagctaattttttgtatttttagtagagacgggggtttcaccatattggccaggatggtctcaatctcttgacctcgtgatccacccaccttggcgtcccaaagtgctaggattacaggcccttcctcatgattagatcctgtttatggatcattggcagaaatagctctgaaatgagccaccgcacccagcctgaagatgcaattattaatagttaaggtgaggttataccacagtggagtggacctctaatccgatatgactgatatccttattaaaagggcaaagttggacacagagacacacacacagtgaagtgtccaggtgaaaatgaagacagagattgcaatgatgtgtctataagccaagaaatggcaaaaattgccagcagtcaccagaagctagggaagaggcatggagtagattctctctcatgtcaagagaagggaccaaccctgccaatagcctgatcttggacaccttgcctccatccagaactatgaggcaataaatttgatttctgttatttaagctacccagtttgtggcactgttttattttacaatagccctaggaaactaacacaccagaattgttattattaaggaagggagttatgaacatcaaaagggagaagaagactggaatgaaccttgtgatgttgaatttgaattggatgtattgaggtaaactcatgttttttaatgtttagagatagatatagaaataggcataaatgccatgtgtgtatgtctactacacatgtttcttagctctgctctgagaaagcctggatgcaacaacggtcccatagcaatgaacatgtccagcacctagatctaaatggcattttccactaacaagaaaaagggtttcttggagaaatggcggattccaagactgggaaactacacgaggaaggtggaaggtcttattgtgccaaaaagcaaggaagtgctccaagaatggtgggtacatgtcacggggcacaaagggcagcttgaaggagctcccattggtggaccatgagacaattcaagtaccaaattagacaatgatagtggtggactatgacccattgaataggattggaaaccatgggcccatgaagacagaaataaataagcaaataaactgaaaatgtagtgagaaatatgataatcatgtaatttcaaagtgcctctgcaaaacacgtattaattacaaagaagaaaagagtaactttatagtgaagaagtctggcagacagcaacttaattaagtgatcagcgtgagcatctccagtaatggggcaaattaaaatcacgtgtccctggataggacgtcaggggaagaattcagcgtcatttctgagctatttctgccaatgatccataaacgggatctaatcatgaggaagcgtcagacagacccaaaataactgtcctgtaatctgcagacgtgtcaaggtctttagagtcaaggaaaaactgaggaacttcttcagatgaaaagagactaatgggacatgagaactaaatgcaacatgattctgtagtggatcttgctgctataaaacacattataggaataactggagaaagtggaatgggccctgaggattagattcatccatgtgtcattgttaatctcctgattttgatgcttgcattgtgattgtgtaagagaaggcccttatttatagaaaatattcactgaagtattagacagtaatggggcatccagtcagcactttgctctccaatgcttcaagaaaacggaagttttttgtactgtactttcaacttttctgtgtgatatttgaaaaaaaaaaaaagtgtgatcattgcacaaaaagcatcctcctggactctgtctccggaggttctgatttaatgggtgtaagttgggaccaggacggctgggagtggtggctcatgcctgtaatcccaacactttgggaggccaaggcgggaggatcacctgaggtcaggagttcgagaccagcctggccaacatggtgaaacactgtctctactaaaaatataaaaattagccaatcgtggtggcagatgtctgtaatcccagctgtttgggaggttgaggcaggagaattgcttgaacccagaaggcagaggttgctgtaagccaagatcacgccactgcattccagcctgggcaacagagcaagactccgtctcaaaaaaaagaaagaaagaaaaaaaaaaagatgggaccaggacatttgcctgtgtaaccactcccctaagagatgtcaatgctgctggtccgtagaccaggccatgagtcctaagtgtctatacactgacctcactgttcctggactcaccaattcatcatcagtgcaggtcctttgctctgtgccttctacctggaaagctgttctctcagatcttttagaattggctcttgtgtgccattcagatctcaactccatgccacgttctcagaggggccattcctgacccacccacccccagctatccacagctgttctaccacgactcccggcttcctttcatctgtgatctctgttagttttctatggctgctggaacaaaagagcacaagcctagtggctcaatataacccaaatttattatctcacagttctgacacgttgaaagtctgacatgtgtcccactgggctaaaacggaagccttgggaaggctgtggtgatccttctggaggctctaggggaaatcagtttccagattctaaaggttggctgcattccttggcttgtggccccttcctccatcttcaaaggcagcagcaatgcatctctgtgccttttttctgcagtcacatcttcctctgatgaactcttctacttccttttacttttaagtatccttgtgagtatactggggtcaccctgataatacaagataatctccccgtctcaaaatccttaacagaatcacatctgcaaaatctctttcgccgtataaggtaacatattcacagggtctggggaccaggacatatctttggtggtggtcgtggcgggaagggcattattcattctactacattttccttgaaccaacctttcaggatggaagaaaactttgaggttgtctgcccccaatgtctttctcctagctctgaaatgagctgttggtggaagggcaagccacttcacaccctctttgcctgttttctcatctctgcaatggatatggcagcatgtaccctttagtgtctttgggatgaatgaatgaagcctctgatgcaaaccatgtcgtaaggactcccacacaggaaaggcatattacatgttcacactttccccttttgtccttgccccatcaggagactgaggccccaggcagggctgagcctggcctcttccacaaacagacctctctaaccccttgctgattttcttcttcccctcttcccgtggtttaaatggcagtgagcttctatcctcagctttcataagactctttgacctaaagacaatatgatagagtcagtagcaaagctcagctctccctcccacaccttgcccacccctacttcctgatacaacatagagacacacattcattgtcttcccaggtcttcccactcaggtgacctgatctgaatgatgtgaactttcctgtagacagcgggaaagaagcatatggaggaaactcctttctggagctccaggaaagcactgatggatgtgagaagaagacctatgaataaatcactcaccacccctactgccactatcatgactattactgtttttctctcatatgttatcctaagggccttgtctatatcccaggatttgaggaaaaatcaagtatttgatatgagagtgctttgcactgctgggagcctggatatgtgtctgacatcaccattattaatagatcaagcccagcaccaggtgccattctatgcagcagcactgctgacctggtcacttgggaccataccagagcagctcaggcctctaccaaacccttaggaatctgggttttcttcctgttttcttgcatgggaatccctgaaaactgcttacttgcccccatcctaccaatcaagcccatgaatttattcaaagacactctacaagccaagtgtaattctaggttctggacctttaacagtaggaaatataaacagactttccctacatgtggctcacagtctagcccaccttagagcttacttttagaatgaggagtggggtagggatgtgggtagcaactttagccagagacggttgagtcctctaaatctattcttctctatcctgtagtttttaactcatttggaggagtcatgagcctcttagagcatctaaagaaagttatggtcttgcttacttgaaacatgatcataaacacccacctctacacacacacacacacacacacactcacacacacacccctacacacacacacacaccactacacacacacacacacccctacacacacacacacacacccctacacacacacacacacacacacacacacacacacaccattttgtaatatttttcttttttttaacttttattttcagttcaggaggtatacgtacagtttttttgttttgttttgttttgtttttgttttgttttgagacagagtctcactctgtcccccaggctggagtgcagtggtgcgatctcggctcactgcaacctccgcctcccaggttcaagcgattctcctgcctcagcctcctaagtagctgggattacagctgcatgccaccatgcctggctaatttttgtatttttagcagagacgggatttcaccatgttggccaggctgatctcgaactcctgatatcgtgatctgcctgcctcggcctcccatgtacagttttattacatgggtaaattgcaagtcactggagtttggtatgcaaatgatttcatcaccaaaatagatagcaagtatagtgcccgataggtagctttttaatcctcacccgcctcccaccctctaccctcaagtaggctccagtgtctattgttcccctcttcgtgtccctatgtactcaatgtttagctcccacttataagtgaaaacatgtggtatttggttttctgtttctatgcttatttgcttaggataatggactgcagctgagtccacattgctgcaaaggacatgatttcattcttttttatggctgcatggtattctatggtgtatatgtaccacattttcttcatccagtccaccattgatggacatctatgttgagtccacatctttgctactgtgaatactgctgcaatgaacatacaattacatgcatattttggtagaatgatttatatttctctgggaatacacccagtaataagattgctaggttgaatggtagttctgtttttagctctttgttctttttgcttaatatttacaaagaatttctgagaatccatgacccatggaaggaagccctcttgtggatctcaggttagaacccatttctttccaccagtcctgtctaatccaagcaaacttctactcctctccaacaagtcttactttttttttttttgacagagtctcactctgtcgccaagctggagtgcagtggcacgatcttggctcactgcaacctctgcctcccaggctcaagtgattctcttgcctcagcctcccgagtagctggactacaggcatgagtcaccacacccagctaattcttgtatttttagtagagacggggtttcactatgttggccaggattgtctcaatttcttgaccttgtgatctgcccacctcggcctccaaagtgctgggattacaggtgtgaaccactgtgcctggccactttcttaaaggccagagaacagatgaattaaaaagttgagagcttgctgaataatgattcagttacatactcaggcctgtggatgctcataggagagaaggaacaggacagagtctaactcaggcagaagaaagggaacaaatacttctttagaattgccaaaaatggaaggtgtgtgaagataagggtgttggagatagttattatttttaccttatgtcaaaaaatgttcaaatgaattgtatcctcaacaaactgagaattttccattgtacatcctgactttttgactgtaatgagcagttttcttttgagaggccttagcttcaagctgagaccaaggattctagtctctgagctggttcatataaccaataaagtaattaaatcacatccatgaaagagaacattttcatcataggatacagtaggggttcaaagtttgactcttctgtgcttcagaaagaatgaatcaggaaattcagaaatgaattcaggaaaaatgtctgctaactctacccaattttgaatcacagcattaatttcttaagagcatcttctgcactcatccaagaataaatgaacatacacacactcttcgttataaccagagtctgagcatcaactcttcagccacttccacttcctactccttagcgctttgagatcttagggtgcagctcaaaatcagagaatgagctttgcctcagatcctgtgcaagtgtgctagccgctggccgtggtgctgaaacaaagcctgtccttcagggctgcaagtcagctctgtctactttctcatttctgaatgttgtctccagcacaggattacatcaggttgcacacagtgtcttatttcctgaaagcctctatttcccagatgttttacttggatctctgatttaccccgtcctcttctaactctcccctttccagccactctccaacaataatcgcatgccccagccacatggcctgacttgtaatttcccccacatctcaatcctctccatagttctgggccttcatgcatgctattttttgaaatcacacacacacacacacacacacacacacacacgcacacacacacacactttcacttgtcatagcccttactgattacaaattctttgagactcgccaaagtgtcacttcctttaggaagcccttccttgattacccgtaagttgagtttattttaccttgaaaattgttaccctctgctacctcaaatgaaataagtcagccccaactctatatcccctgtgttgctctctaccactgcattcaactctcaattataattttcttttacatctgcattttttactagactctgcattcctagaagtggcacaaaagagaaggcacatggagattaggttgatatcagctaaaataagtcataaatgccagagtaagaagtctaggatttatcctagcacctacacacaaaccgtgcaaagcataggggcaaggaagccactgcaatttataaagactccaccttctcagtacctgacccattgttccagcaatcaatgatttaaagtctctttgagctcttcctgccttatgaaaataagaaaaaaagaatgatatgaggagactggagaccttctacactacaattatccttttaacagtgattttctcagaagtgttcccttggctgtggcatgattcatctttctgcaaacataatctagtatttcatcaaagcaaagatggagtaacaagggccatgtacacttcctggacaacaggaatgtgcttagggtattgaatataccccatttagatttgggaaagatagcatacaaattagagaaaagggccggatgcagtggctcatgcctataatcccagagctttgggaggccaaagcaggaggatcacaaggtcaggagttcaagaccagcctaaccaacatgatgaaaccctgtctctactaaaaatacaaaaattagccagggatggtggcgtgtacctgtaatcccagctacttgggaggctgaggcaggagaatcgcttgaacccgggaggcagaggttgcagtgagctgagatcatgccactgcactccagcctgggcaacagagcaagactctgtctcaaaaaaaaaaaagggaaaagaaagaaaaaaagaaattagagaaaagatagcctaattggctagagaatattgtctccaagaggttatcaacttctggaactaaaactaaagtgtttctgcctcaagcaatctgaaagatgtattgtctgtgcggtggggttacccaatcctggccccagctgtaggtgctggcctaaagacaaagaagggaatgaagagaaaaaattaagagttgtaccagtcatccgctccaaccactcttctcatattcacagtccccagacccactgccagttctcatcatgagaagtcagctccagatgaagacagcctccttgccctgcatcatccagtgaatgaggctgcctggacctggctgagaccacccctgtccactagtcaccccaagacctcacatctatgaagattgagcatacagtgggccccatgtcaggatcaggtgtgaggggaaaggtaggaaacaaaatcccaggcccacccttggggaattaagaatagaaataaaggtgaagttcttactatcagtttagaagacctcattttcttcttcttcttctttttttgagacagagttttgctcttgttgtccaggctggagtgcaatggtgcgatctcggctcactacaggttcaagtgattgtccggcctcagcctcctgagtagctgggtttacaggcatgtgccaccatgaccagctaatttttgtatttttagtagagacagggtttcaccatgttggccaggctggtctcgaactcctgacctcaggtgatccacctgcctcagcctcccaaagtgctgggattgcaggcatgagctgttgagtctgacctagatctcttcttaggaagaagaggaaagagaagcaaaagacagaatttttgcccttaggggactcataatctaggcagtgagaaggattcacagtgagaaggattcacattagaggaccataccaaccaatgcaatgaagtggaagaacaagccacttgtgtgaagtacagtatccagttccctccttgggctttctttacccagagagaaagctcagcatctccctgagaatctttatatcagaaaccgattttcccttttctctgtgttcctacagacctgttttgaagctgttctcatggcctcatttgattatgagtcagtcttttttattagacagtgaatcccttgaagttgttactgtgttaagccccatgcctggcacttggtaggtgctttgtagtgaacgttaagaccagaatattgcatgatgtttgatccctgggtcagacccattcagtggctatagcaaacgtgctccaatccttttactctggctcaggctgacacccaagttcacttcgtgtggttacctatggagatgcctatatatcagtcagagagctgaggtcccaaagaatatcagtggtattattcatgactcaacaaagcctgttccctttcaagaaggacattcctgtctcagataatggaattcctctgctgcagtgagatctatttgacggggaagtcatcaccacttggacatccttttgttgaaagtgcactgagcacgtgtgctctgcaagttgccatggggggtatggaaaagcaggagacagaacctctgtcctcatgaggctcgcttttcagcaatggagggaagacatgtgtcaattgtaggagattgatcagagtggtgggagaaattacagggaaaggagcaggtcttctgaaaggttggaaggctccgcatagctctgggggagaatagctgaaggcagctgttctataaccctgagtatgtgcaagggactgagggggaagctatcttgatcaagcttgtttacttatattgaccaggaactgacctttgatcatccttgcgcatgaggttccctgaaaggggaacaataaatgttaattacctgcaggttgtgttgcctccaggttttccgcattgtgcatgcactgaataaaagcaagcagctctagcttctcagggctgctctctggccactagagccaggcagtcacctagctgctcttacactgcatacctgtgtctgagtaatttcacctgtcagccaaggtctgaggcacagacccggcagtgaatgtcatgatacaaggaaaaggaggcaaaggcccagaaagtagatgtaaagcactgggaaccacaatgaagggggtgatagcatcgagagcttgcttaagaatgggacctttcactctggctctgtcatggttttgttgacaagaggagatggggaactgttttgcctgggaacaatgtaagttctgcaagggtgtcactaatctgtgttttctggagtacctagcacattgcttgagccatatgtttgagatgtggattctttactcccaaacagctccagtaccatagtcagtttactttccaaatgtccatttatgtgacatcaacagtaggaatggctaggaagcaggagatggaggtgataggcccggatactctcttgctgtgtgaccttagatgacttggatttcctgtctgaacctcaacattctcacttgtaaagcacatggagtcattgagttgtcatgcaaaccaaaggagatgacagagacaagagtgctggaagttaggtggccagatctgctcacccactgtctgccatgaggtcaaggtcaggcttggtgggaggttccttccaccctgggcaccaaagcccaagattgacatctggagcctcagtacatcatcatgggctctgccaaggagaagaatgttcattggttccaggattgagtggaccccaacagcatctccctcaaggagcacagagtctttcatctaagaaggaaagaaccacagcagatttgcctgggacagtgagtcagtggtagttgttacatgccaaggaaggcagttgtttgttgacttttgttatctacttttcattccaagaaacagaaactggatatgctcagtaggaagatatttttaaatattcagattgaacagtggcatttgaatggaaactttttcctggagcctttaccaattctgttttgtgccaaaagatacactcgatttttttcttgttagctatttttattctttaacttactgatcaatttcgatacccaaaagtatgtgagacagtcctttgggcaccaagaaaaccagagtgtccacttgcagacctacagcccaagatcttcatcaacactgtcatcatcgtcatcgctgtcatcatcatcgctgtcatcatcatcaccatcgctgtcaacatcatcatcatcatcactgtcatcatcatcaccatcactgtcatcatcatcatcaccatcactgtcatcatcatcactgtcatcatcatcatcatcatcactgtcatcatcatcatcatcatcactgtcatcatcattgtcatcgctgtcatcatcatcactgtcatcatcatcatcattctcatcatcatcatcatcactgctgtcatcatcatcatcatcactgctgtcatcatcaccatcagaactcaccacctactacggacttcctccaggccaggcattgtgtcaagtgctttgtatacataatattaatatctctaattcctacaaaatccctataaggtgaagattagcttctccgtttttcagatgagccttatgaggcttgggatatcgattgacttgctcagggctgcacagcttgtaagtcgtaacacttggatttgaaccattgcctttccatgtcatgtgcattgaagacgatgttgacctgcttcgcagtggtcctacctgttttggggtgcgctatcattcctccccaccccaccttctggcttcttgtaatcacagccttcgatttttatctgatggtccaccatcccctagatctcagccctgtgattgcctcagctccagaagggatgcaggactgaggtatgccccactggagagttcagttgaggcttcggggaagtaaaaaaaaaatgttggctgggcacagtggcccacgcctgtaatcccagcactttgggaggcagatggatcatgggttaggagttccagagcagcctggccaacattgtgaaaccctgtctctattaaaaatacaaaaattagccgggcatagtggcatgcacctgtagtcccagctactccagaggctgaggcaggataattgcttgaacctgggaggcaggggttgcagtgagccgagatcgtgccactgcattctagcctgggcgacagagcaagactctgtctcaaaaaaaaaaaaaagtccttttgcccaaatatttcaagatgagaggttataaagtctgctgctgctacgctagtcctgcttccagtaaagcctaaggctaaaaacagctcaggagaaggcagacctgagagctggagaggtagagccctgaaagcatggtgcctaaagccatatctaggggtgttgctacttgggggtctcttgagcctcaagccgttcctgaggccttgacttccagctctgctgtgcctcacagcatccaaggagagattcttattcaccagacaaccctcttctctggacagaggctcctaggagatgccagaattgttaaggccatctggccctgtctatgtgaccttaagtggcttgttgcccatctctggggctcagcctgtcttctgtgcaaggaaggacgaggacttgatggtctcaaggacacttccagttttgaccttctacttcctaagggtatttaatctacaggcagacaagggatggcccagcctgccccacatctgttcgtggtgagcacagcagtttccagagagaagccatttgcccaggacccagcaggaagagcaataaagaaatccctcagcttccatattctaattaaatcagcacaaatttaatttggatgtaatttttaaaacatgacccataaaaatatccacaagcactgctctattgggcctcctggaggaaagatggcctcagaggccaacaaaaggcctgattggcgctttaatcaataggtatctgcgaggagacagtagaaggctccaggggatctgtgtgtgctcaggagggcgttcctgtgaaaccagggatgcgaagggcaccaggacaaggtagagtcaagaagacactgtgggctgggaacggtgactcatgtctgtaatcccagcactttgggaggccaaggcgggtagatcatgaggtcaggagttcaagaccagccttgccaacataatgaaaccccgtctctgctaaaaacacaaaaattagccgggcgtggtggcatgcgcctgtagtcccagctgctcgggaggctgaggcaggagaatcacttgaatccaggaggcaaagtttgcagtgaaccgagaccgtgccattgaactcccgcctgggcaacagagtgagactccatctcaaataaataaataaataaataaataaataaataaataaataaacaaaaaaacaaacaaacaaagacaccacgaggccttctgtgatgcttcaaggcaaaggaggggaagagacaacagttcaggaccaacctaaagtgacagcagtgtaagatcagcccgaagtgggcatggatgaccattccagaggctggaagatcgacaggctgcacagtggggtcactagctgggggcttgtcgagtcccttaatccacctaagactcagttttcttgtctctaaaataggaattctgatacctgccttgtgcacctcatagagtggttttggaaccaaggctgggatgaaagccccttggaaatggtaaagtctccttcaaaggctagagggcgccaggtcaccatcacctccttattagttgatcttttcccaaagggggcttcaacgtttctacccagagtttatcctagaggtagcacaatgcagtggtccagtcttggcctccaatggagaccgcttgggtgaaaagcctggctctgccactgtctggtggtggagccccacacaagcttcttaacttcccttggcctccctttcctcatctgtaaaatggagatgatggacgtgatacttacctcctagggatattgggattttaaaaatccacttgtgtgaagtgctaagctgtgggcctgcccaaaagcaggtgtttgtaattactgcagtcgtgcctgccagccagtttcactcctcctcctcactggcactgctgcaattcagaacagccttgcccatggatgctcacctggacagtgggaccttcccacaccccctgcctccagggcctcctctccatcccagcctccttgccagctgccagagggtggcttacaaggcctgctgcttccctggccccttagcatagagtcctccctgctgggcacggtactcacagcttttgcataatctggcccaaacacgcacctccagcttcacctccttccgcacccactccattctctagctgctctgagccggcttcctgctccctaaagcccatgtccatcacatctttgttcattcacttgcaccacactcacatcttagagtgtttcctccccattacctctgtcaccctggaaaactccaaaggtgctttcaaccctgattgctccatctgccaccccagtctctcgtgagtggctccttggcctccttttcctgttatattcccaccttctcctgttcacataccacattttagcaacaccaactgctcacaggcttccctggtttgggctgatgagtaagagctactgtgggtagagtttcccagggtgggaatcccaagagatgtggaaccctcagtccacactctttagccctagaggcccaacaagttgggaccaaaggactgaatcacctttttccttctaatgagccctttccagggatttttttttttttcagagtttcactctgtcacccaggctggagtgcattggtgcaatctcggctcactgcaacctccgcctcccaggttcaagcaactctcctgcctcagcctcccgagtagctgggattacagatgcacaccaccaggcccagctaatttttgtatttttagtagagatggggtttcatcacgttggccaggctgatcttgaactcctgacctcaagtgatccacctgcctcggcctcccaaactgctgggattacaggcgtgagccacagtgcccggcctccagcttatttttatgcatatgctttcatttttaattttgttgagaaattttaaagatacaggaaaaacataaaatcagcaccccatatgcacctacttatccaccatgcagaactgacaatttgttcatgttacttgctttgtcttcctttttagaaatttataaaatttaaatcacatatgtattatgacatgacagccagactcaaagtctctttcttcctcattcctaattctattttctttcatcctgccaaggcaaacatgatcatgaattaaatgtgcacttctctggttccatttttaaactttggcatagacacagaaacccctgataattcgtagtattgcttcgtgtgtgttgatcagcataaggggtagaatttcaacataaccttcttctctgctttctgcaacacactcttctcattcaacatgatcgtcttgagatttatccatattgctgcgtgaatctagcacattcctttaattgcttttaattttattttatgaatagactccattttattcagttactcctctgattgcctgaaatctaagttgtttccctttttttttttgtcattaattagtgctgcagtaaatacccttgcacacccctgggggggtttctctaaggtggaaacctagatgtggaattgctggtcttagctttcgttgcattttcagtgtggctggatattgccaaactcctctgcaaagtggctgtgctaattctcactactaccagcaatgtctgagtgtgtctatttgcaggaggccctcattttataggagagaaactgaggctcagaccaggcaatggaattgcccaagatcctgcagctagtcagtggtggagcctcgattaggacttgggctctggacaccacacaaaggaatgaacttccagaaacatcctccttttgcccagccagagtcaaattaatgacaaatcttcccttgacctctgtctgatcggtctttgtccaaccttgggaaacacttgtattagtttctactttgctaagaaagaaaaaaaaaactcataataaaagttactggctaataacaagtatcttgtgtcatggaaattttgcatatattcttcaacaataaaaatgaaaacatgttttcctttagtaaaggaatttctgttctactgcacttatcacccctgggaaggaaatctgatgtaccttgactctattttatgaccatcttggagaacagcgatgttgtcaatggaagcatgaagaaactataggaataaaattagacagagatggagacaatgatactaaaataaatatcatttgaaattggattttgtggtaacagcacagcagtcgtcactgggagcgtgaaggtcacgcgtcagacatggagaacaccaggccctggtgccaaaacattttgcttccaaaagcatggtcctccctggactgctttcaaggttgcctttacctgtaacacctccatccacacaaggcacggtcagtgcagaaacacgtgacaaggctgacacacaaagatgggcgagtcggggcacggggaaggaagttcacctgtcaggccaaactcagatcacagccgccaggtgagccactgggtggtgccagaaaggttcctgcagatgtcctggcagagaaaggtggagaaagatccccgcctagtggaacagacagtggtcaggagataagggagatcccaacactagttacttgtttattgcctctcccatctaccagactttttcttttctttttctttttctttttctttttcctttttttttttttttttttttgtgagatggagttttgctctgtcaccaggctggagtgcagtggtgcaatctcagctcactgcaacctccgcctcccgggttcaagctattctcctgcctcaggctcccgagtagctgggactataggctcctgctgccatgcccagctagttttttgcattttagtagagatggggtttcaccatgtttcctaggctggtctcgatctcctgacgtcgtgatccgcccgcttcagcctcccaaagtgcaggcattacaggcgtgagccacccacactcagcctaccagactttaaacttcttgacagctatagctttttctctgattatcttaatatttccaaagtttagaaatgttcctaacacatagtaggtactcaataaatgttagtttttgagtcaatgactgaatgaatcctgggaacatcatccccagccaagccagagctcagcttgtccaggctgcagcagactatctggcagtagatcacccaacccagtccagccttgaagaacccctcccaccagattccccctccatgaagcctcttctagttgctccaggggggctctctagtcttttttaaaaaatatcctgcttccttcagagtaagccccatacaatcaggcaagtattcctggagttctcttggcaacttcctctccccgtggtacatcagtcaccaaagccctctccactccaccttccaagtccccttcccctgccttaggccaaatcccatcttctcagccagtctccctgacttcagacctactaccttgtagcaggcagttttcacttggttatgctgcagtaacaaacaacctctcagtttcagaatcttgcaacagcaagatctagttgcaactctcctgcactggcgggatccaggattcaggctggagcaacagtctctgtctgagacatgccattttcctagcaagaaaaggcgagagagcagcacaaaaatgcaatgcctctgtggtggttttaaaatcttttttacaaatgtttttatactccttgcttcgagaggtggagtttaattctcctccccttgagtataagttggagttagtgacccacttataattaccagcccatagcagaactgctggtgtgtagtctctgaaaataggtcataaaagcactgtggctcattcttggatcttggagcactgctctggggcaggccagctgccatgtcactaggacactcggcatctttatggaggagacgttgtggtgagggacggaggcctcctgccaacagccagcactactggctatgtgagggagccaccttggaagcagatcctccagccccagtcaagtcttcggatgactgtggcccaactgatatcttggctgaaacctcaagggtgactgagccagaaccaaccggcaatgctcctcctagactcctttcccagagaaactgtgtgagataataaatatttattgtgttgggccactatgtttaagggtaattcattatgcagcagtagataactaacacagccttttaaagcttctggtcagaattggtgtatgtcactctactctcatttaattggccaaaacagatcacaagatcagcctggcatcaaatacctatggaaacattgcaagtcatagaggaatgggtaaggaaatatagcctgcttacaggaagagggagtgaatggttaagcacaatagtagagttcaccatatcctaccccaattcgtcctgttccttctcccaccataaaacacaaagttgaccatatcagcttccgttcttaaaacactttagtggctcttcgatgcctccagcacaaagtgttacctcttccatcaatccttccaggcttccatgttcttcctctgcctcagtgccaccctctatcagcttgtgactctatcctgtgctctgatttgtctgttcacctgtgcatctccttgatagcagagaccacactgattcatctttctctcctgatttctcagcacagggtcagatggtctaattttgtgatgaatggatggatgactggatggatggatggatggatggatagatagatagatgggtaaatggaaggctgaatagatgcagggagggacaggcagcagagaaagtatggggataaatgagcagcaatcctttggagttttgcagctgttgcatatgtgagccttctctctctgaccagacaagcaacttctacctccgaaccctggcctgggaatcaggaatcaaaaggtgtgtgttaaagtcttggccttgtcttgtaatggttttgtggcattgggaaggttcaaagttttaatcactagtgaaagttaaaaatgcctgaggaacaaaatcaaaatgaatgaagatctgatacagtgccttacagactgatatatactgcgcctgtgaggtgtgcccctctccagcctctcccatgtgctgcaaataagcatagaggtggactgtcagtgtcctatgtccctgagaaccttgagtaaaccacaagctgcccttaggacctggctgtgagactgcaggacaagggcctggacaatggaggagaaacagatacctggaactgtcaccaaaggcccctacaactcctctggagggcagcctcaggatgggaataactttgggctctcctttctttatcataacagtcaccgtggtgatagtggccaccaccattctctgcaggccaccaggcactggtccacagagctctgggagatgagcagcacacggctgtctaccctgccatgcgggtagattcacagaagccatgtgtctttggcctgactctgtcttcctggctagagcccattggtccagacaggaacatttgaccccaggtgagctttaaatgttgaacagagagttttggagccaagtcacatcaagggtggggtggtctggaaggtgccaaaaacccctgctgattacaacaattttccttgttgctcaaactcattagagatggtttt[137 bp omitted]gttgaaaccccgtctctaataaaaatacaaaaaaattagccaagcacggtggtgcgtgcctgtagtcccagctactccggaggctgaggcaggagaatggcatgaatctgggaggcggagcttgcagtgagccaagatggcacaactgcactccagcctgggtgacagagcgagactccatctcaaaacaaacaaacaaacaaaacaaaacaaaacaaaaaaaacctcatgacaaaccagcaaaaaaaaaaaaaaaaaaaaccacaacattttattgtgcccatttcacagataaaggaactaagaagctgagagctgtatcgaccagctcaagtccctcagctaagaaagtacagaggaaaagtagtgcctcaccagtcccattatctcaacagtcctcacaatagccccactgtgaggactggcagagcagcatgttcattcccaatttgcagatgagaaaactgaggctccaaaaagagaagtgactttcccaaggtcataccatgagcaagcaaccgaaaggacccaaaccaaagttttcagactcttgtccaagggctctttgccctgcccctgccccctactcccaggatcccttctgctagcagctcccctaaagtgctgaccttgtgccctgaatctacctactcactcagagagaagttatgtggccttggagctacttcctgaacaagcaaaggaacagctgctggccccagcctaggagaagagagagcctttgtaagagttaaagaaagaggaaagaaactcgaagtgtgcctcaacagtcaaagacaggtttattttagagaaataaatctgagaggggcttctggccaatttcggtcaggagcattgtctcttacagactaagagtatatattggttttagggtgagggggcttatcacaagcttggaatatttctgtgttagggagaagttttatggcggggttggaatgtctctggtcagaggggagttatctcagggctggcatgtctctggttggggaggggtttgaaatgtttctggttggagatgtgatttgtggtttatggtcctgctgaccttagccattaggctgatatcttttggatttaggcagtttttgatcaaggtggacttaaaatgacagtgcttgtccaagatggcaatactcctgctctgtcagcctcatgcagggtgtaggccctggtcctgcaaacttccaacctcagttattagtatcttgcagcatcattgcagcaggacactcgagcatcatcctggccactagagctgtgcctgcagggcctcagttacagccattaggtttggggcctgggaagtgaggctcaggcgaggtgctttgggcatccatctcttggacacctgcatgcagtgagaaccttggctgaacacttctaccataatgggttaggaaatgtgcccaaaggcagaagcctgcttcctgggagaggctggagaactaggactcatccaccaagagactgcagacccattttgtagtgaaaagtgctctccagaatttaaccaaatgctcaccagcgtccccagcagaggggaggagcccaaggacctctgtcctctctcacatcacctctctcttccctgcctgttgctccaggacatgtttgtgagcctgtcaaatcactcagggaaaactaaagtgacaagtagcctggatgtcggccctcccttcctctaaaacctgctgtggctccccattgtcgagaaggtgaataaccaaccaaaatgtctttgatttacacccacaccatgtttagtatatttcctctaattcttaccacaatcccatgtaagaatggaagaagttcccatatcacagatgaaaaacattaggctaaaaaagatgagtccactaattgacaaggccagaatgggaacacaggtcttgataatatcaactattaacaatgacaccgatatcaatacctgttcccagagtcgcgcctaacgtgtattctatttattgaaggagatgctaacggggaaggtgtcctggcatctcagtttcagcagtggctccaggttcagttacctatgaatagctgcatcacaaacagtccagaactgatttgctttaaaccgtgatgatttattatttctcatgactctctgggttgactgggcagaccttctgctccatgtccgtcatctcaattgtttgcgtggctgcattcaggtggttgacgggcagaaggtctgagaaggtctctcacatattggagccaactgtcggctggcacacttctgccctcctcctttgtggcctctccatggggcatctcatcccccagggcctctcagcatggcctctttccccagcagcatggcctgacttccttacagcttggcaacagtgttccaggagggaaagaaaacagcatcttaagggccaggcccagaattggcatggcattactttcactacattccattgatcaaagcaggttgtaaagccagcccaaaggccaagggaggaggagtaaaccctcttttgatgggaggagtggcctgtgcatgcatggatggaggaattactagtggctatctttggaaaccactttctacagatgcaaagctgagagcagagggtgtttggtgtccacataccctgtagagctgttgcatcatctctgaaagacttgcagaaggatgaccaaaaaaaatcacacctggcaacccttcatccatcacccaccttgaaagcatggaaagaaaggcttgaaaattaatgaggagaggatggagcaggaggatgttttttgagagggggtttctggcgtcatgtgctattctctcttctcatggagaaaggaggtgcttccctgtcacaagcttggttcaagtcatctgaatctcagggctgcaggggctggtacctcactgacaccataaaaggctcaagtgatggctaaaggaataacacagcaagaagagggggctgcagcagtttcacttccaggagggcagacgaaggcatggacccttccctccagaaggaagttgtcttgaaagggcctccacccagagatccaccataggtctgttgggagacagacagcaggaagccaggggctgagaggagcctcttaagctgagaccatgtatcccagggaaccgcccattacccaagaaaccctccaaagggtcccatgagtgaaaggatcagggtttgaaatgcaccaccccaagagggcgccagctccagctggtaactccacggatcacgtggttcaaccccttgcctctcctccctccctcagctccagacctgggaaaacccacacagaagaggtagagaaggaggaggtgcagaaactcaatggtagcaagcatcaggaagcccaatcatgaccatttttccccaaggcaggtgtcctagcctgaagggggcccaagctaaggggtatttgggaagagaaagttgttttgaattggttgtgagactaaagtttcgataatatagaaaacgggactttttaatgactggggggaagatgagctacttattaattcctaagattgtacagaaaagctaaagatctgctgaagatttcatctgggaacaggaaaaaattattgaagagaatgaattaatggggtaaatattaaattactttctgcttgcagcctaacaattccagctcattctataaactggttacatatgtgatcagtataattcagtccttaagagcaccgtctctggagccagactgcccaagctaactacccatcatctaatcctagctcttgtattttctagctgtgtgaatttaggcaagtgacgtaacttctctatgttttatccataaacatgtgactagtaatagaatcatggggttattggaacagtttaacaggttaaaattgtaaggaactaagtattatagtagagggtatctcgtggtaagcactagatactattatcacttaccccctgctatcctatatcactatccctcctttgttgagggtcagagatgttaagtaagttgctcagggtcacacagctagtaaggagtggcaatggaatttgaacgctggtcggtccagctgcaggtcctcctgtcctttaccatcagggcatgttgcctcccttatgaacttggaaaagaccaatctctgagactcagtattctcatccataaagcagggataagaataatttctacttcatagagtttgtgagattaaatgagttaatacacagaaaccactttaaacaaccctaaataaatagcatcgacagccagtacctcaaggttcaaccacttgttagctgtgtgaccttgggtaatttacttcacttctccatgattcagttccttattctaaaagaggagtaatggttgtgtctatctcatacggttggtatgaatattaaatgtataatttatataaagcactaagactggtgcctagcccctgggaagttctataaaagcactcagaagcgcctgagctggataccaaatctgtcaaat[133 bp omitted]gcctcagcctccttagtagctgggattacaggcgtgcaccaccacacccagctaatttttgtatttttagtagagacgggggtttcaccatgttggccaggctggtcttgaactcctgacctcaagtgatctgcccgcttctgcctctcaaagtgcttggattacaggtgtgagccactgcacctggcccatacttcctcttatacccccaaggaatataattgtaaaagccacacatgaccaagacatgccccactgggctatcaaaggagcccagaagcacatagttaagtgcaatatttcacacacaccagttggtaaggggcttgggaagagcctccttcgccacaaattgcaggggcagggctgcccacttgctgaaggctccacaattggttctctggcatgatgggcccctctccacccgccccccggcagctggtagaagatcctcctaaaatcccatcaatgaaaaccaggacggttagggtccgtttccctcctgaacaaggaaagagggctcctctgtgattgtctgtgatttatgattttgaactgtctcccatctgaagccaaatcttcttctttttttttttttttttaagacagagtttcgctctttgtcgccccggctggagtgcagtgatgcgatctcggctcactgcaacctctacctcccaggttcaagtaattctcccacctcagcctcccgagtagctgggattacaggtgcctgccatcacatccagctactttttgtatttttagtagagacgggatttcaccatgttggacagactggtctcaaactcctgacctcaggtggtccacccacctcgacctctcaaagtgctgggattacaggtgtgagacacagtgcctggccgtgaagccaaatcttttatgtccctatatctggagcaaaatgcactcacttccaaagctgcagtgtttgagtctagccagaaataatgaattcccagcccccaaagggaaactgtcatccctagcacccatgctgcacccccacccagagctcccaggtctgcttgagagagggggtcccattcagaagtaacactgaaggcctgagggtttggggagctggaggatggggagggggaggagaggaaagaagatcctggctttccccacatccttggctaagggatttgtgcccaaggatgagggcaggtgcttttcaccaatctcaataatagtcattactgtctagtgagtgccactgtatgctgcacccttcctccaggccctttgattcatcatttctaatccttagaatcccaaagagcaggcaccactcttttgcccgttgcacaagcctggatactggggctgagaagcgtcaggtaacatgttcaaggtcgtaggggtggtaagtgatggagcagggactcacacccaggtctgtaagacttgggctggtataagtcagggtacactctggagccagactgcctgggtttcaagcctgggctgtatgaccttgggcagtttttcctctgtggctatatttcctcatctctaaaatggggacaatgaggcttcccacttcatagagttgctacaaggattaaataagctggtgccttacagtgcctggcacacgcttagtgtggcacgagttcaacctggcactgccattgttctgcaatgtgtttgcaccctgatttggtacatagttcctgcctgagtctggtttctgaatacaagaaaaatgtttctaggtcggagttctcagaatctggccccctgaccagcagcatccacacaccctgggaacttgttagaaaagcagattctcagtccccacctcagacctactgaatcagaagctaggggtgtgatacgatctgaatatttgttgcccgcaaaactcacatgttgaaacgtgatctccaaggcaatgttagtagaaggcagggcctttgggggatgattaaatcagagggttccaccctcataaaagaaattagtgctcttataaaagagaccccagaggctgggcacagtggctcacacctgtaattccagcactttgggaggcc[135 bp omitted]gaggcaggagaattgcttgaaccctggaggaggaggttgcagtgagccgagatcgaaccattgcactctagcctgggcaacaagagcaaaactccatctaaaaaaaaaaaaaaagaggccccagagagctagctagccccttccaccatgtgagggtgtagcgagaatgcatcgtcactgaggaaccagccctcaccagccaccaaatctgcagtcaccttgatcttggacttcccagtctccagaactacaagaaatacgttttccttgtttatcagctgctagtctatgacattttgtcatagactaagatggaaaggcccagctacctgtgtttttctgtgctccccaagtcactctggtgcgtaatcccatttgagaactgctggtcgaggtattacaatgagcttgggtttcagagttggactgatctcagttcaaaccttggccaagctcttttctggattgacttgggcaaagtctgaacctttctgctccttagtgatcttatcgataaaacaaggatcctcatctcgttcagaaggttatggtaaagagaagatgggacagtactttgaaagtgcttcttaactgtgggatgctgcccagaggttatcaggagccacagtcccctcatccaccagtaggagctctcttggagtccagcatgttggaaatagagttggagcaggcagcctccaggtgggaccccagagattagagaggaagctatagagtccaggccaggtaggaataccccatggcctggggagtctgggggaatctaggccaaggccacatgtcacctggctcctacccctggccaattcagcagccaccctccaatcctgaccatcagtggcctggcccatgacacctaaactgtgcattcctgagtcatgagtccctcagaagagtgtagggtggggacaccaggagtcaagcagaaccctagaccaggctgccagaaccagggtagagatctccctccagccagagctgactggtcctggaaggctgctgtctgctgtctgctggccagaagctatgacttctccctgccctcaacagctatgtctgtcctccaagcaggtcattttctcaagactctcttgcatcaaaaatcctccccaggcttcccaggcacaacttcccttcttccctctgctgggaggatcttgcaaaatcttcctcctgcttagagaggcccttagcaaggctgaggttctgagtaaagacagagcccccaggcaaagcctcactccacctgcactggggaaatatgcagctgactcctgctgtctgctgtggctttgaagaactgagaccaagggttcctctcagggttggcctggcagcccaaaggatgggggtcagaaggttcccagctcggaccctcagagaagcagccctccaaatgcaatgccgcctgcagactgcaaccttgagtgcagttctgttttgatgctggagggcctcctcatcattccacagccagggagctcaccgccttacaaagccatccattctgtcattacaggtctgcctagggcctgcaacctatgcagtttaatggggtccccactatcagaagggcacatgtttggttaaattctctgctgccattgtcttaaaattcttaacaatgtttgagttttcattttacactcagccctacaaattatgtagccggtctgggtatgatcactggggaatcctttatatgaactctcatacacattcccacaaaatcctagaggtctttaagctagatctgctccttctgtcccaggtgggccaggagaggcccctagatggaccctgagcccagggctggaacctggatgaggcaagtgagatgcctggggcatgaagtttaaggagacccttactgtctcagtcacatacatgctgaccctgcacttgtacaacccccaaaataagcaactccttaaattttgcaccccaggtgcctcactcacttcctctggtcactgctaagccagtgtccaggctgtaaggtggactcctcaaccacaacctgtggtgaaacctacaggcctctctctgcttccctcacaggccagcccagtcctgaccattattccactcatccctgggtcagatggtaggaggaaggcagagggttgggcacatagaccaggccacaaacctcaacaccgacgcctgcaggaaccaggactctccacaggccagcagcacccacatcacctgagaacttgttagaagggcagaatctcaaacactgcagaggctgaataataccccactgtatgtatacacagcattttgtttctccatccatctgtcaatggacattaggttgttcccttggctaatgtgaatgatgctgcaatgagcatgggaatgctcatatctctttgagatcctgatttcagttcttttggatacatacccaggaataagattgctggagtatatgatagtcctatttttaattttttgggaacctctatgccgttttccacagcagccacatcatcctgcattcccaccaacagtgtgcaagaattccaatttctctatatcctcaccaatattcatcgtctttttctttgataatagccaccctaacagatgtgaggtgatgacataaatgaatctttaggacattatgctaagggaaacaagctagttccagaaaggcaaatgcagacctccctctgtatctatgggggatttgttccaggacctccttggataccaaaatccacagatgcccaagtccctgatataacatggtgtagaatttgcctataacctatgcatatcctaccacatactttaaatcatctctggattacttatcatacctaatagatcgtaaatgctatgtaaatcgttgttatactacatatttatttgtgttgtcttttattatattgtttttatttttttgtattgtatttgtatcatttctttttcaaatgcagtattttcaatatacaattggttgaatgggaggtacctgcagattgtgggccaattgtactgcttggttccacatatactaggtatctaaaatagtcacactcatagaatcaaagagtggaatggtgtttccaagggctgggggaggagggaaatggggaattattcatcagtggcataaagtgtccactaggtaagatgaataacttctagagacctgccatacaacattatacctatagtcaaaaatactgtatttgttgtatgcttaaaaatttaagagggccaggcgcagtgggtcatgcctgtaatcccagcactttgggaggctgaggcacgagaatctcttgaacccggga[143 bp omitted]taaccaaaaaaacaaaaatgcagaatctcaggccctaacgcagacctactgaatcagaatctgcttatcgacaagatgcccacatgatctgtgtgtctgacaagcactgatttaaagggcccccgagttcagcatcctaccccatatcttggttaggatagaaaaaaagctgatgaaaatctcttgcttcaggcactgaaaacctacttctgcatttgtgtctaagaccatctgaatgcttctggccctgtctatctgctttacttcagctctccctgtttttgttttagtttttaattttagcttttaaatatcaggttttttccattaaaaatagcataaccacatttaacaaaatatttgttaaaaaggaatttaccttacctctcccagcatatacaaaaattaactcaaagtggatcaaagatctaaatctaagagctaaaactgtaagattcttagaagaaaatgtagaggtaaatcttcatggccttggatttggcagaggattcttagacgcatgagcaagaaaagaaaataatagacaaattggacctcatcaaaatttaaaacttttgtacatcaaaagacactatcaagaaagtgaaaagacatcccatagaatgagagaaaatgactgcacctcaaatatcttatgagtttaatatctagaacatgtaaagaacttttacatctccataacaaaaaagtaaagaacctaattttaaaatgggcaaaggacttgaataggtatttctccaaagaagatatataaatgacttttaagcacatgaaaatgtgttcaatgtcattagtcattgggggaataagatcaaaaccactgtgagatatcacttcgcaactattaggatgtcagatggctttaatttaaaaaaaggaaacacatgttggtgaggatgtggagaaattggagcctttgtgcattgctggtgggaagataaaatggtgcagttgctgtggaaaacggtttggctgtttctcaaaaagcaaaacagaattagcacgtgacccagcaattacactcctaggcgtatacccaacagaactgaagacaggaactcaaacacatacttgtctatcaatgttcatagaagtattattcacaagagccaaaaggtagaaatgacccaagcatccagccacagatgaatgaataaacgaaaaaatggtgtacacagccataaagggtgtattcagccataacaaggatacatgttacgacacggacaaacctcaaaaacaggctaggtgaaataagccagacacaaaaagacaaatattgtgtgattccacttccatggggtatctggaatagacaaattcagagaaacagaagacagattagaggttactagaggctgaagagcagtgggaatcgagagttatgggtatagaatttctgtgtggggtgatgacaaagttttggaaatagataatggtgatggttgcacaacatggtaaatgcaatttatatcactgcgttgtatgcttaaaatggtttttaaaaaataatttaggccgggcgtgacggctcacacctgtaatcccaacgctttgggaggccgaggcggtcggatcacctgaggtcaggagttcaagaccagcctgaccaacatgcagaaaccccatctctactaaaactacaaaatttgtcgggcatggtggtgctactcaaaaaattagccaggttccccagctactctggaggctgaggcaggagaattgcttgaacctgggaggcggaggttgcagtgagccaagatcacaccattgcactccagcctgggcaacacaagcgaaactctgtctcaaaaaatgtttaaaaagataatttaaaacatttcccacagccctcacctccaatccccaaccccaacatttctgcaagcaggagtcattcaagtttgccacatcccagaatgtcagccccctcctttcagatcagggttacatcagaatctgagccctggaaatgtggagccacaaggaatctcagacactgcatagtcctatcttcccacggtaagatggaaacaccaggctcagaggcaggcaaggacaatgcagtttgaccccaggcatgctgacagtgcccaattcctacacaactgggggtccctgcagcccccaacagatcaccccttggtccctcttccctcagccccagcctggattacccctgctccaagcagctgccccattaacccacccaactccactaaccattcagtctcttccttagcaataacagcgtcactctgcaggaacacttagtggaaattgacaagcccagaagcgtcagcatcctgggtgtccctgagaagctcatgggactgaggagacctgagtcctagttcctgtcctatcaccactgatctgccttgtgacctcaggcaagtctcctcccttctctgagcctcagtttttccatctgtaaaaggggttaaaaatgccttttgcacagggcatttaattaataatttaatttaattattattaaattaaataattgtgaaagagagtaatattcttatgacttcacaagtaaattgtttcaccttcactagaccgtaagctgtttgagaataaatcaaatattaccttccctcttcactccccaggtataaggctgggagcacagtgagtgcctagcaagcacaataacaatgtgtgtgtgtgtgtgtgtgtgtgtgtgtgtgtgtgtatacatataaacatacatatgcacatatttctttcagttacctacagttaacactttttatgagatgtaataacagaagaaaagctaaatgagtaggtattattgcccccatttcataggggaaggaaactgaagttcagagaagtcaagtaatttgtgcaaggtcacacagcaagcaaccagcagaactaagacttaaaattgtgtctgtggcctcaaagcctatgagccttctgtgtaccaagagagatgcatgcaacaattcaccagtgtctctccaagccctgtgtcccgaggctgcttaactcacaattattggcagataatttatcaggtctgcagacaatgaccccagcctaggaacgattggtggtttgagccagaagtgggctggaactctgagagaattttcccctagaaatgtcatcaagtcttggctgggcgtggtggctcatgcctgtaatcccagcactttgggaggctgaggtgggcggattacctgaggtcaagagttcgagaccagtctggccaacatggtgacaccccgtctctactaaaaatacaaaaaaaaaaaaaaaaaaaaaaaaaaaaaggccagtggcagtggctcatgcctgtaatcccagcactttgggaggccaaggcaggcagttcacgaggtcaggagatcaagaccatcctggccaacatggtgaggccaccactgaagactgccttccagctcagcttctccctctgcccagtaccacctcctccccatctctactaaaaacacaaaaaattagtcgggtgtggcggcacgtgcctgtagtctcagctactcaggaggctgaggcaggagaatcgcttgaacctgggaggtggaggccgcaatgagccaagatcatgccactgcattccagcctgggcaacagagtgagactccatctcaaaaaaaaaaaaaaaaaaagtcaccaagtcttaactacttgaaatagctttgctgtgggtatgttcaaaatctttccctatggttatttgcaatattcttgtagtaaatgccaccttctctatgacgcaatattgggaaacatcactccctgggcctcctcctgaccccctcaatactccaagagcagcttcagtaggatattgactcccactagtcacccccatccttctcaaaggcccctgtagcagataatatgacacatcaccagggccccctgcagaaatgaaggacacatctccagctgctggaagtgctgcaggcagagagccctcacctggcatcctcttccagggtttgctcagctgaggagggtccctcacccaagatcatgccctctttctggggaagcccacatccaatggctgatcaacccaggggtaaaaagacccagccttctagcctcaccttgagacagctgtcaagggtcatcctagcagcagaactctctgtggggatggctgaggccaccactgaagattgcgttccagctcaacttctccctctgtccagtaccacctcctcgccctcccttccataggcattggcccccaaaatataccctaaaaaacatcttgcatgcccactgtctgcttcctggagaacccaccctgagacaatccttcacaggcattgcagaagctgccccccaaagcaaaacaggggagccacctgatggaacctgcctgagctcaactcctagcccccttgaagctgaggaatgagcactaaattggaggcagctggttctgcctcccctggctcaccagctgggagacccaggtgccaacacctcccctggtcatcagaactttgtctttccaacacatcagcaccccctcccagcctccctcccagggatcttgccaggagcagatgaggaaaagcctgtgaaaacaccctacaggctgcaaaaggctgcgccaatgggagaggctgtttgaatgaattagcaccaactccgccgccaagcagttcccgcctccctcctcttctaccagtttctgtgcctatcatattgccagggccctgcatgcctattttttcccacaaaacaccagctgcctggtgaagtctaatgcctgactattggggagaagtgcccatgattctcaagtgcagaagcaggttgctttgagcttcacttgtgaattaatgctgaggctcagctggcatggagcagaccctagcccacccacttgtcccccacacacaatgaccaccgactagctacctgtcattcgtgagagactctgggcaacagcttatcagatggaggcgtggccatgatcagatggggacccaagcttggattctcttgtctggtgctctaaaagctcagtctatgggtgctgcctcagtttcctatagctgctataacaattaaccatatacctggtggcttaaaacaacagaaactgagtctctcacaggtctagagctagaagactgaaatcaaggtgtcagcagggccacactccctttggagcctctggagaatgacccagcccttgcttcttctaggactggctgccctagcattcctgggcatgtggctgcaccgcttcaattcccgcctccatcctcatgccaccttcccctctgtgtttctgtatcaaacctccctctgcattcctttttatcaggatacctacggtggcatctattgtcttcaggatgatctagaataaatttcccctctgaagattcttaattttatcacaacttttgccatgtaaagtaagactcataggttctaggcataaggacaaggagatatcttttggggggcaccactcaccccaatacaggtgctcctggcatatcctggaggactggaaggaaaaccaggcaggttctccattaaagaagtccctggtctggcctctgttctgaaatttgtgaagattagggacccacagacaccatggccacatcctcattgtggctgctcagatccatcagcaccgtggtgtaatcagagtgtggccaacatcatcgcgctttggcaggctagcctgagaaccacccttgggattttacattgtttcaaagaagctgtaccctttggggttatacccaggtagggtgagcaatatagcaatttttctgaggctttgctagtgttcgcactggaagtccgtatcccaggaaactcctcagtcctaggcaaacagggatgattggtcattccacacccaggtaagcgcaggagccagccgtctacatgagtcatccaggtggattttcaaagcctcctctatcatttgggctggcttccccatcagcctcaggcaccagccctggcagacacccaaactgagcagaagacatgtgttggccattcctcagggtctcctctcttcgctctcaatcagttctcacgccctcttagctccctgtccatgaagctccatgccttagttttcatccttgctcctccccactccacccccaaccctggatttgatgatttccctgattctgtctattagttgtctaggcctgatgttaaaaagtaccagaaactgggaggcttaaacaatggaaagggattgtctcacagttttggaggctagaagtctgagaccaaggtgtcggcattgccatgctccctctggaaccagtaggggagtccttttcatatggcttggctctatgtccccacccaaatcccattgaattgtaatccccattgttggaggtggggcctggtgagaggtgactggatactgggggtggtttctaatgttcagcaccatccccctagtgctgtctcacgagagacctctcatgtgatagacctcctgatagaccatgtgacagatatctcatgcgatctggttgtttagaagtgtatagcacctcctgctttgctcacaccgtctctctttcttctgtggccatgtaaagatatgcctgcttccacttcaccttccgccatgactgtaagtttcctgaggcctccccagccatgcctcttgcacagcctgtggaaccatgggccaattaaacctcttttctttataaattaccctgtctcgggtagttccttacagtgatgtgagaatgggttaacgcacctttcttgcctctctctagcttctcatggtttactgaaattctttggtgtgtagacgcttcagttttatttctgccttcatctccacggaattctccctatgtccagatttccactttttataaaaacaccaattccccatggatgatgagggaggactgaatatgtataatcatgttgctaactgtatgacttcttcatcacactctaagatccatgaatgcaaagaccatgcctgtcttattcaccactctatccttaagaaataaatagaagtcagtcttcttatatctgtttaaatccttctgggaatgaagagctcactaactcctcaaaaagcccatcaatttatgctcaactctgaaaatgaagaaggcaaccccaatttcatttttctaagctgcttcagttttgtgccataatcccatgctttcatctgtatgcatttggtaacaccagacaccaccagatcaccccatgtgatcggaaaataatcaaggacacaccccattttctccaagctctttgaccttccaaaatatcttcaccttctatcctcacatgcaaccccaacccagcccatctgtaaagagaatgcacagagtaaaacttaagactaaattaaaccccattagttttcagagaaatgcaaatgaaaaaaaatggttccacttcctaacctccgaatttaagaagactgataacatgtagtgctggcaagggcagggagaaagagacactcacaaactctgttggtggaactgtaaattatcccaaccattttagagagtaatctagcaaaatttattaaagttaaagatgttaagtccttttgacccaggagcaatgctgcttctgggatccatccaactgaaataaaagtaccagttcaaaagatgtatgggcaagggtgtttattgtagaattgtttataataaaaaagaaaatcttatattctgtggaatactacacagcttttacaaagaatgaagcagatctatatctattcacttggaaagatatatacaaaatattgagtgggggaaacaatacggagaaaaatatgtatatgtttctgctttttaaaaaaaaatagtaataataaatggagccacatcagtctggccacatctggaggaaggagtaaggcagggctggggcctcagtgcatcaacaccacaaacggctttgaggtgcatggatgactaccccctggctgctatgtgtgggcaggtcatcatgagctcagccccgacctgttcatggcagccctcatgcctctcaccctccagtcagggcagatcccatgagggatctggggaagaactaatcccagctgaccaaacttaagtctcgccgccacacaagagcacccccaagcaggcacagaagtcttattgcaggacaggctctcttctttttctccacactgaggggtccagccaccatgaaggccattcagactccactgaaatggccactgggcaccatcttgaataaaagtccactgtggcagacaacagcagtcctttcccacaaacctacctacctcagacaattccacacaaatatactctcacatatacagagagagagagagagatcaacaccaaaaacctgagcaaaccagtcatcagccataagcagaccaaatgaggtgaattgacagcatttctttagcaaactgtgcagagagcctgaggccagggtgaaaagttttgaagcttaagaaattaacaagcaagtgcaatttccagcctaatggagtgtaaggcacaatcaacacctttgtgaaagggaatatggtgggcacttccagatctttccacccagcccagagcctttgttacgactaaagataaagatttcccgccactggtgctcctcctaacaatgccacataatcccagctctgcctcactgacccacatctgtgcagaatgggagagaagagttccagttcgtagcttctaagtctttattcagagtcagtctagtctcctactatttaaattttggagttcagtggtaaagttcacaatttaaaaaatagagacatcatagtaaaagctgaggaaagaacgtccccaaactattagcagttgttgcttttgggaaatagtatggggagataagggattttgctttttattctgtgtcagttgaatatttataatgagcagatattacttttgtaatttaaaaatttatataactaatgttccttagatataatgatttggtttgtttctgtttggctatatcttgatatcagaagtttagaggatcacaaactgtcaaaataaggagggaacataaaagctcatttggaatcacctactcaagtttaaaaagagctcagagatggggaagtggggaggagtcatttcgcccaattcatggcaagttactgtcagagctaaggctaaatgccctggtctcctgatgcccaggcattgctctttccctgcatgctgcagaccccagctgcagatttgactgacagcctcctctctctccacactcaaggatggacaagtactggttccagcatgcatcatccctaaagccagtgatggctcagaacttgatctgcatctcaaccacctgtggcttctagctgccgctcaggactcctgctattatccaaacacagcccatcttcactaagacaggggtgataattacacgagctggttattgtcaccctctcatcagctcttcaccaagatacagacaagatgtggaatgtgaaaggagacaccttggcaaccactgcagctgggtctgcagattgccagccccactgtgacatggctagtgtcttcagtctcttctctcatccctccttgttttgcatccaacatttcagacatagggaatgactaatagaacaaacactcatcccacagcactatcacagtgcttttcccctgggattttaaaaagagtgcaagtacctgcatttttccatcctcccaggtggtcttgatgtgcacttcatggagaggcccttcttcatttttatgtactttagaatcctctatttgccagaaatatctgaccttcatcacacttggtcccagggcagagtcttgcctgcaattggcaattgcaaattgtttttcaggtgaacgtttgttggaatgaattgcttcaaggtggctggcttgagaaggtgttggggggctctcacttccttttggcatcctctataatcttaggtgagaaagaccctgctcttctatggatatggaggtgggagattggtgttggcagaaggaacaaagcacacattgattcaactaagtcagtcaagccaacagtcaattccaattgtgagcagctgaccctacaaaaggatggaaggcaagaagttcaagtcgcttgacatttccctgataatgtccaattggccacattccaaaagccaggccactctgatcagatgctcccacttgtctgggcttccagaatgactctgcctagtaaaccttcagtcaaagttgatagtgagtggaaatctggccctctttgacttttcagcacccgggacagcacccagcacctagtccctgcttggtgctgtttgttgacatatcccagagatgagggtggagggtttaagcattaatacctttcagcaatggaagagcaacgcttggctgccctaactgcacccgatgggccatcaaacttgtccagacccccgaaaaccaaggtcaggaattgtggaaggagattcctttaaaatcacagctggactcagatacttacataggccagggtactgtgtaggtgaggcggtattaatcaaagcagcctcaaggcaccaccagtcaactccctccagatagggtatattctcaatatagatcagcacaaaacaaatagatacagacagacttgtgctatgctgtccccaccgcctccagtcacagaagaggacaattttaaatcaacaaaatgttcacacttatctactttattatccttttagcgacacaaataacatatgctaaaatcaaacaatcgagtgtagaaagaaaaagtgaatatccttccctaccccaataagacttccacaaccaccaccatcatccctcaggcatgtatcctttcacatatttctctatgctcacagggaaacatagagactcacacacacacacacacacacacacgtgttctggttttcttctcctctaaaaatacataggcataagttgttctttttaacaattgcatattataccatacaggtaaaccatatattattaaaacattctcttattcatagttgtattcataggtgtttcagtcaggattctccagagaaacagaatcaatagaatgtgtgtgtgtgtgtgtgtgtgtgtgtgtgtgtgtgtgtgtgtgtatatatatataatatagaaagagagagagacagagagagatacatacatacacatatgtatgtgtgtgtgtgtgtatatatatatatatagagagagagagagagagagagaaaatatttttgaggagttggctcacatgattgtagatacttgataagctgcaaatcttcagggtacacagagagcctggagttctggtccaaaggcactactgtgctggaagagctgcagttctggtccaaaggcactatggtactattgtgctggaagaattcactcttattccagcatagtgctttctattcttaacagaaaaaggtcgctctttttctattaaggtcttcacctgattggataaggcccacccacattatggagggtagtcgatctgctttactccatgtctactgatttaagtgttaataccttttcaggaacacatgcaatagtatttgatcaaatatatgggcaccatgtcctagtgaagttgacacataaaattagccttcacaataggcattcaaacatttaccaaattgtcactcaatgacacattccaagctggtagatttttgtccacatacttttctttcatccctacagtatcctgtgaggtagatagaattaccctgtttcacacatgatgaactgaggctccaaattcaggtttgtctaattacaagtttgagttctgactcactctcccaccagctctgtgagcttgagctgtttgcttaaccttttgctgtcagcttcccacatataaaatgagcttaataacacatctacctctagggttgctaggaggattcgatgagataatgcaggtaaaggggctcacactgcacaaagcttggtagactataaatgttccataaagaccacatattatttctactattgttctggcgaaggaggcctggaccccacttggacaaagcccaggagcagtcccgcaacacgtggatgtaacaggtgcataaactatttacaaaccacacccgtcacccgcgagctggggaggctccttaattaagaagcagcccatcctgccacctggcagtgtgtttccatttcctggcctgagcttcagtgtttccacagttggcactttgcagaggagatctgagaaacattagcactctctgaagcccacgctccagacccactggggagcccacctctccatctgtccaatcatgcaccaaacaaccacgaggcaggagtcactgagagatgtatttagaatgtgctttcgattactgaggtggaggccactgagttccacgctgggcaagtttcctggtgaacatctcctctcggctgggcccccaggccattgctgagacacagttcagagttttgatggcactgttcacctggtggctactgtgaatcccctctctctctgtggctggactcaccccaggaacacaggatgctgagaagccactgccatctgttcatacctgctgtttcaagccacctagggctaggggatgatttacatggagaaaaagcctgggacatcagacaggacagactgctctgccccctcacacacacacaggccacccccatttagacatgtgaactgcagtcaccatttgctccaaagtgtgaattgctgggacccaaggcacccatttctcagcttctgagctagagacaagggatgtgagatgtgaaagttgatgggttcaggcgggactgattagccctcatgcccacctctcttgccttgttctgtgtaaaaaggttccacgttaatagaagggagaagagttggagggaaagaagtgaatctgacacagcatagctaagtcatctactgccctgcttacaggacaggaagagggagcgaaaagaaataggtgagttccctctgaaattgaggtggggaggtgggatttgaaaaaatcggagacctatatgctgtttgctggctggagttttgaagttggaaacccacagatgtttctttcacacccagaccctgggagtatggatggatcagtgaggtatatgtctacgcctgagagggagccgaagaggaaacggaggatgaacccaaacatctcggcatccccaagtcaggaactcagagggtagctgtgatggtgaatggtagatgtcaacttgactggattgaaggatgcctaggtagctggtaaagtgttgtttctgggtgtgtctgtgagagtgttgccagaggagatgacacatgagtcagtggactggaagaggaaggcccaccctcaatgtgggtgggcactatgcaatcggcggccagcgtggctagaacaaagcaggcagaagaagggggataagcagcttgcttgctgagtctgcttgctctctgctgtatctcttcccatgctgtgctggatacttgcttcctctcctcctgcccctggacatcagactccagatcctttggtctttagattctggaacgtgcaccagcagcatcccaggggtcttgggacttcagactcagactgggggctgcactgtgggcttctctggtttttggacttggactgagcctcgctactggcttttctttccccagcttgcagacagactatcgtgggacttcgccttgtaatcacatgaaccaattctcctactggttctgtctctctggagaaccctgaccaatacagtaggtgacagtgggggactcatggggtgtaaagatgtgactatcagagaaatgcaaagtgccaaagatagcaggcagccaacggttcagggtattgccaacactggggcactgagaaagagctcaagactgacctgggactcacagctgtggtgagcccccagagcaggcaggacaaagaacacacaaccccatgttccaccataaagccagttgcatcagcaggccttggttcatttgtccatggggctgaaggggaacagagggctatgaccaagctaacaactccaaatatacctcccctttccccaataaatggataggctaagaaaacttgaactggaagaaaaaaagccacctgcacttcatcaactaggtgcttggagtgaaaaaaataaaatcagttctggaatcccagaacatctcattttccccacaaccagctctacaaccattgaaattctatacgcatttcatagacaaatgccaataagcacatgactccttgtgataaggagattttttcttcatgtagcattgagagcaaaactttacatatggctaggaaaggcaggagcctattttagaattcttgaaatgaagatgggactatcatgctgagattttctgtattggaaggaggggtgttgcctataggaaacccctagctcacatcatatcttgtcagggaaggatttatttcccctgaaaaccttctgttgtatcctagcctgggttcctcccagaagcttatttgaagataaggatttgagaacaggaggtctgtttgggagatgatctagaaagtgttctagagaatgggaaagtgagtcagggaagggacagaagcccatacttcccccaagtgacttcatgagcaggtgaccacctgggaagctgagatgtagctatgtagcaccccctcccataactactaccagggttaggaagctgggttcttttttgtttgtttttgttttttgtttatttgtttttttctgttgtgttttgttttgttttgtttttttttttgagatggagtctcactctgccaggctggagtgtagtggcacaatctcagctgactgcaacctccgcctcctaggttcaagcgattctcctgcctc[135 bp omitted]gcctccccaagtgctgagattacaggcgtgagccactgcacctggcctaaactgagttctttattcacccatttctttttgtcatcaaccaagagctgctcctggtggcattgacttccaagcactgcagcctggcctgcacctggcctgagcagagcccttggcaaagcgtcatcgttgcctgcagtcagatgctggacattgcctgcagtcagatgctggaccatgcagcattggtgagtgctgatggggcaccgcaggacacagccagagtctgctgccctgggcatgcctgtggcttatcacatcccatgtggcaagcgttgtctagtctcctgaatcatgaaccaaacaacacaaatgacacagtctatgtaataaacagtctatgtaaaattcatactcttaaaattgggaagaactatctatgtcatttagtctaacatctcacccagtacaggaaatcctgctgaaccatcattccaagcaaaaagtcatcctctacatgaatgatcccaagagggcaggaccactccctcttaagccctcctctcctgttgtagaaattccagtctatgaggtagggttgccttgtcttagttccaaacgtctccctctgtgacctacacctgttagcctgggttctgtttcctggagcaatgcaaaagaaaaaaaagaaaacacttttccatttatgccattgatgataggcagaataataaccgcccccccccccccacacacacacacacacagacaaagatgtgaacatcctaatctccggaacctgtgaatatgttgctttacatggcaaaagagactttgcaggtgtgattaaattaaggactttcagatgggaacattaacctggatcttccaggagtgtccaatgcaaccacaagcctccttataagggaaagaggaaagcaggagaacaagaaggaggaagcagagctcagagtgtcaagatcactgctttgcaaatgaaagagggacctgcaccaaggaatggctctggaagttggaaaagatgaggaacagattctttgctagagtgtccagaagtaacacagctctgttgacatcttgttgttagcctagtgaggcttccaacctctagaactgtaagatcaatttgtgttgtcataagccacaaagtttgtggtcatttgttgtggcagcaataagaaactaatacaccctcacggtagtgcttgatgcaggtgaggccaaaaactatgggctctcctttccaaacaatgcatgattttccaaccataccttgtaatatatggcttccaggctcttgctgtccttgtcaccttgctctgaaaactctctagtgccccatgactaataggccccttcacatgctggccccaagcagtggatatataattccatgtgaaatcaactcaagcccagaaaggactaggatcctggcttcccatgatctggacaacgtactctccattgcagtcaaatttttacaaccttgacatgccaacaaccaaaacccggagtcctcttcatggaaaatttttcaagcctgttctccttcatcctgtaagtatgcaattgagttttacccaactgtgggagtttatatttattctgctcatcccttcaacttctttacttttctttcttaatttcaaccagttgtttcaacccatcgaagtcatcttggaatctgactcaaacacctaagtattggctgttcctctccttgcatcagaccatctagtgataaggaggcaaaacatactcccccacagtagccccaacattcactgtatcccttcaggatcccccacagcctgttatggttggagatctggcctctacagctattcctttcctccatacccccaaagacaagtacaggtcctttgcattttaagagttttgctaatgattactgagagaaattctacatggagtaatagcgtaattaatatgaggaaatcacattagtcttagaattctacaaagtccataaagtctggccctttgttcacagttaaagccctctctgagatgatcactagataccctccatggaacacctcactggctttaattcctaaaaatgggcttaagccctcctccacttctgattctctcacacatacatcacctgtaatagtgagtacacccctcccctaagtgaagatgccatcctgcagaacatcaggtacctcccttcctctggtggccattttacatttgagatccccagattgtgagatccttaagtcactgaggctctgttcagcaaagaactaatcctctatgaaaatttcttcatgggcactcatcagtgtttccagctgataagcagaaacttaacattatccaaattttagttgtgtctacctttgagtcattggtaaaaatgctaaatagaacagagccaagcacagagagctggagaacagttctgcagacatttttctcacttgcccccagttcagtcttaacatccaactccaaatcagcccacatgaagctcatctttcccataaacagttagatgggaacatagagaaagacagaagtcaaaaccaggtctaatatccagaacatataaagaactcttaaaactcaacaacaaatgggcaaaggacttgaatagacattcctccaaaaagatacacaaatggccaacaaacaccggaaaagatgatcaaccgcattaatcgttacagaaatgcaaatcaaaccacaaggagatgccactccacacccactaggatggctgtaataattttttaaaataataataagaattggcaaggatgtgaaaaaattagatgtgaaaaaattagaactctcatacattgctggtgggaatgtaaaatggctcagccactgcggaaaatggcgcagtggttcctcaaaaagttaatcataaaattactacatgaggctgggtgcagtagcccatgcctgcaatcccagcatgttaggaagctgaggcaaaaggatggcttgagttcaagaatttgagataatcctgagcaacatagggagacctcatctctacaaaatataaacagaattagccggatgtggtggcacatgcctatagttctacctactcaggaggctgaggtgggaggattgtttgagcctgggaggtcgaggctgcagtgagccatgatcacaccgctgcactccagcctggatgacagagaaagaccctgtaccaaaaaaaaaaaaaaaaactactgtatgattcagtgattcctctcatatatatacatatacctaaaagaactgaaaactgttactaaaacaaatgcatgtaaacacatgttcagagcaacgctatttacaatattcaaaaggtagaaacagcccaaatgtccatcaatgaacaaatggggaaacaaattgtggcatgcacatataatgaaatattattaaaatattaaaagtaatgaagcactgtattaactcaaaaaggaataaagtattattaagccattaaaaaggaatgaatgatagcaaagtggataaacctggaaaacattatgctaagcgaaagaagccagacacaaaaggtcacacattatacaactccatttatatgaaatattcataataggtaaagctattgagacagaacaaagactagtgattgccaggagctgatgagaaggaggattggagagcaacagaaactgcttaatgggtacaggatttccttttggagtgatgaaaatattttggacccaaatagaggggataattgcatgatgtcccaatctagttgttagcgggaaggatgagttgctcttgggctgatttggagttggatgttaagactgaaatcagggcaaatgagaaagatatttgcagagctctctctctctcccatggttctctctccttggttctatttaacatttttaccaatgactcaaaggtggacacaactgaaatttgaataatgttaaatttcttcttattagctggaaacactgatgaaagtgctaaatgcacaacgttgtaaatgcacaaaatgccactgagtcattcacttttaaatggttaattttaggttatgtgagttttacctcgatttaaaaaaatatctagtttccactttcaagactgtgaacttaaaactcaaggatttacctgtattagttcattttcaccctgttgataaagacatacccaagactgggcaatttacaaaagaaagtggtttaattggacttacagttcaatgtggctggggaagcctcacaatcgtggtggaaggcaaggagaagcaagtcacgccttacatggatggcagcaggcaaagagagaatgaggaaaatcatcagatctcatgagacttattcactgccacgagaatggtatgggcgaaccacccccttgattcaattatcacccaccaggtcgcttccacaatatgtgggaattatgggagtacaattcaaaatgagatttgagtggggacacagagccaaaccatatcattaccttactcttcccaaaactgcattgaaatgaccaaagaaacagaaaattaagatccctgagacagagagcaatgcctgcagtagacagaaaaatcggagagtatctgggaggaatgaagcctcctccctgaatggaaggaggaaaagtggtcagtaagaaaaaaaaaaatggctcacaattcatacaagaaaaagatggtcccatttgaaatgttggcaggaaggttttccaacagagccctgtggaatctctcaactcaaggcaacagggccctcgagtgaaagggggtagcatcccagctggcaagctggtgtgtgtacaggctgcatgcagaacatggtggtggttgtaccaacaagtcattgggagtggtgtgatctgggcaagtagagacagacttagtttaacaggctcctggcatggccaataagactagaaagaggtgggctaactgtaggtcatctcaacaggcatgatttaaaaaaatcaaaatcccaaacccacagcccagtacctgaaggactaattcactgaatttcagtggctgttatagaaccagagtaagcatgaggcagcataatcatctatattgtattttattttttaaaaaacacttacctttaccacctgatgcattcttatattttctattctgatttagtctgtgtcaaaaaaaaaaaaaaaaaagatactggccatcacccacttacagggtttaatgtagcctagatctccatggtaactccactgctatctatacacagatacccctaagatccaagctaaaagaagagaaggggagatggaggcaggaaataatcagaagggggaagttgcaggtttcagcgattctttcagggaaccaggaattcctggaatcccgcaatggaggattcaagccaaggacgtgggactttgccacccacctgctgcaggggagaccgctacttgatctgctgtcagcagatatgtaaatagatttaggcaaatcaaaaagacaaatatggccaggcgccgtggctcacacctgtaatcccgccgccgaagcaggcggatcacgaggtcaggagttcgagaccagcctgactaacatggtgaaaccctgtctctattaaaaacacaaaaactagccaggtgtggtggcatgcacctgtaatcccagctactcaggaggctgaggcaggagaatagcttgaacctgggaagcggaggttgcagtgaggtgagatcacaccattgcattccagcaggggcaacaaagcaagtctccgtctcaaaaaaaaaaagaaagaaagaaagaaagaaagacaaatacatgtgtcacaataggaaaaaaggccaaaggcatgagctggcaactcatgaaaaatgtgaaacgcatgtgacaaggacatgacttattaatttatgaatagttcccccaacccccagctctcttgagccacttctgtctgcaggggtgagaaaactggggaggaagggaaatagctttggagaagtcatttttagttattaatgagaatttatttaatgttctttgagagacacaagtaaagcctgattcctttttaattactttaggctacatgtctgtgcttctctgattaagctactccatgctgagccacggggacctggctttcacacaagttacacagatgaagagatgctgaacctcccttgagatcaaaggaatgcaacatcacacaacagtgtgaagtcatttgaacctaccagactggagaaaataaaaacaacagtaccagcaggacagtaaattgtaccaactttcccagatgcaacctgttgctagtagcaaaatttaaatggcacatgctctatgacaccgcagttccatgcctacaaatttagtgaaggaaataattgcaaaagtacatacgtatatttacaagaaggtgaacactgagggtaacctaaatatgccttgctctcacttatctgctactcagggtcccggacacacacacagagcacttaaagtcttcacttgagttaaccttcatgtcaactccatgggatgtatgttattatctccattttagagctgaagaaattaagactcaggaagtttaagtgacacatccaaagtcactgcaggactgcatgacaacaaccttgctctttggttacagagtctaaccataccacgacctattagagaaatgcttatgagcattcatttatgcaacaaacattcactgaatgcctgctatgtgccaggtgctattctagatgctgagcaaaatgggccaaaggcatgaactggtaattcacaaaaaaagtgaagtatgtggggacaagacgatggcttattcatctgtgaatattcccctatttgtaagtcccctgggtgattaaaacagaaaaaatcctcgtcctccagctgcttatagaaacttgattatgcgctgacgtgggaagatggttacaacacggtgaggctgggaaaagcaggtcaaatgattgtactccatgtaaatataatgtatttattcattcaattaatatttacggagcagctacttttgtcaagcacttctttcactgatctatgagacactcaaaggcctcaaggaactggttctgtttccttacttagaggttcacccacggccgggcactgtggctcatgcctgtaatcccatctctttggcagcctgaggcaggtggatcacctgaggtcaggagttccagaccagcttggccaacatggcgaaaccccgtctctactaaaaataaaaaaaaaatccgggggtggtgacaggtgcctgtagtcccagctacttaggaggctgaggtgggagaatcactggaacccgggagacggaggttgcagtgagccgagatttgcgccactgcactccagcctgggtgacagagagggactccgtctcagaaaaagagaaaaaaagaggtccactcaggggcagacacagagccagtgaattggaaaagttattgagtaaaaaagtgagcaaaagagagtgggaggcacaaaagatagcaagctttgaaacatcatttacttaaattattaataaaattattacaaaagtgacattcttgaaagaaaaaacctaaaacaatttagaatagagagcgaaattcctccccctctatccaacctttagaactaattcttgaccctttgagtgtataattttcagactcccaatcacacccttcaaaaaagatctcccttttttctctgttgcagtgcactatccatttgccgttgcctaaccaatcacagaattattttctttgtcagactatttgttcattttccttattacctcatgagaatataaccttcacacctaaacttaagaacaaagaaagcatgtatcatgtcatatagctcttatggctaagtatgaagactgccataaaaaataaataaataaataaataaataaaagaaaacaacaaaaaaataaaataaataaataaatttttttaaaaaagaatttctttcatctcaggagtaacaaaaactatctctagttatgaatgagaacttatctctagtttttgttactttactttgttactagtttcgttactttactttgttactttgttactacaaaaactagagacagttttcttttcttttcttttcttttttttttttttgagacagagtcacgctctgtcgcccaggctgcagtgcagtggcgcaatctctgctcactgcaagctccgcctcccgggttcacgccattctcccgcctcagcctccgagtagctgggactacaggcacccgcca[138 bp omitted]ttttcttttctttctttcccttccttttctttcctttccttttcttttctttcctttcctttccttttcttttttgttccgagactgagtctcattctattgcccaggctggagtgcagcggctccatctcggctcactgcaacctccacctccccagttcaagccattcttgtgcctcaacatcccgagtagctgggattacgggcacctgccaccatgccaagctaatttttatatttttagtggagaaggggtttcaccatgttggtcaggctggcattacaggcaagagccactgcacccgcctcagcctcccaaagtgctgggattacaggcatgagccaccacacctggcctgtatccatgtcttgcccgccccacctcactccccaagttttccccttaaaagctctagagcctgaatgtccttggctttttgaagctctggtccagaagaacccatttttataaccatctcaagagtccatgggttagacattctatccctagaattctagaattctaggggtgctctgagggtcagcaaatggactaatcaaagcccagcttctttgccccacagtatccctgtctgacactggggcctctgattccctgacgtgccatagttgccaatacagataaccgtgattccgtgagacacgggtatatgtgttttctcaagatgtgagagcaaaagcaattaaaaaggcattagttgggcttttgtgtcgacttatgttcttaaaactaattatttgttcattaaggctcccagccttcatcagaggctttgtcgcatggaaatagctgacgagctcaacttgtgggtatgaaatgaaaggcttagcagaagcaaaatatgctccacaattatgaacagcctctgtctctgaggtaatcagaaccaacattctccatgagacctgcaaagtttggggttaaaaaggaagacacacaattcatggttggcttctcagctctgcatgatgtgaaaatgagccagaagctttattatccagacttttgcatgcatcttcttgatgtgcttccagttatagacctttgaccattctagaaaggtgggatcaaaagtatacattaaccacagttatgtatttcctctctcacctgagatcctattaaaatgaaagtaaaagacccataaaagttataaacacagattgataaagacaacaagaagagagacatcagcagacaagagatatcaataaattagccaggcgcggtggctcacacctgtaatccctgcactttgggaggccgaggcaggtggatcacctgaggtcaggagtttgagaacaccctggccaacatggtgaaacaccgtctctactaaaaatacaaaaagttagccagatgtagtggcggggcctgtaatcccagctactcggaaggctgaggcatgagaatcacttgaacttgggaggcattggttgcagtgagccaagatcgtgccattgcactccagggtgggcaacaagagtgaaattctgtctcagaaaaaaagagatatcagtaagtttctggaagctaggaagcaggtggatgggtgccaacaggtgaagtagtgtagaggaagccacactaagtgtagacatggaaatggacgcagttcaggaagtaatctgccttccagaaccctgcagttgggacacagaaatttcagatataaatggaaatgatatatgaagttaaaatcagggtaattgagttgattatctctatataaaatatcttaatccactcttggaccaaaactcctagcagctacatagagctatctgagtaaaatatcgaagggtcaatctcaaaaaagttgatagtccatgtattagttatctattgctgcatgacaaatgtccccaaacatagtgacttacagcaacatatatttattatcttacaatttctgtggatgaggaatttgagagtagcttagctggatggttctggctcaaggtttctcataaggctgaagttgagatgtcgtccagggttgaagttttccaacatggccatgtgcatttgttcatgtactatctatggctacttttatgctacaatagcagagctgagcagttagaacagaaaccacatggccacaaagtcttaactatttggcttaagtaaagggccagatagcagatagtttagactttgcaggaatgtggtttctgttctaactgctcagctctgctgttgtagcatgaaagcagccataggcaatacataaacaaacagacttaactggggctggatgatccattttctagatggcacactcgtagggctgttgcctggaggcctcagctccttaccacatgaacctttccacagggttccttgagtgtcctcatggcatggcagctgacttcccccaagggggacaacaaagaagaaatagttgcctttgatgaccaaatcttggaagtcacacatagtcacgttggccatattctactcagcagaatcaagtcactaagcccaatccttactcaaggaaagtggaatgaagctccttctcctgaaggggagcatcccccagaatctgtggacatgttttaaaacaaccacactccaggaaaacagacctccatattctggtatttaggggtcttccatctctaaagccagctcctttaccaacattttagagcaaattccacaatttaacaaggtctcctcatactcataggctaccgaagcaactctatattccttaatttaaatgcaaattgtcaaccaggacaccagatatttttaaaggaaaacaacttgcagtagaaaagagaataactcaacaataataaaggaaaatactgacccctaagggattagagacaattcaggaaatataagacaattagaaaaaaacaaaaaacctctggtatcttcaggaagaatccagaagatgttgcatccattatacaataaaatgattctataaaacagaaacaattagaagacaaaaaggaacggttaaaattaaaaaatatatggccaaaattttttacatgtgtaaaaggattgttttaaaaagtcaaaagcaatagttcagaaaaacataaaaacaacaacaaaaagagatgaaaacaatgagagagagaagaaaaaagatatactgaataaatctgggaggttcaacaggtattggatacctaaaatatatatatattaaagtgtatatatatatatatatatatatatatacactttaatatatactttatatatattaaagtgtatatatatacatttagaaaagtaagaaactaagaaacttatcaaagctaaaggacatgaatatcagtgttggaagtttcactaagtgttcaagcatagtcaatgaataaagaataatatatagacagttcattggaaaaatttaaaatgtcaagcataaaaagaatgccctttgaccttctaaagcagagaggttggcaaactaaattcatgaaccaaatctggcccaccacttgtttttgtcaataaagttttattggaaatggttatgtctgtttgtttatgtattgcctatggctgctttcatgttacaacagcagagctgagcagttagaacagaaaccacatgcctgcaaagtctaaactatttgctatctggccctttacagaagaaaatttgctgacctctgttctgaagataaaacttacaaaaagagagaaaagttcacccccaaaagaacaaagtcaacctggcatcagaaactttttgtcagcctcattgaacaccagaaggtaatgggaaaatgccaccaaggtgctgatggaaaataatttttactctaaaattctatagtctatattgaatgccaagataatataaaggcattttcggacagcaaagactcagaagctttacttcccatgtacctttttaaaaagtgacttgagggtatgctctggatagacaaggaagtaaatcaaaaaactaggaaaggacgcaagagagagtggattcactaaagcaaagcccttggatggcagccatacagtatgcctagaaagcattcagcagaattagaccaggaagatggaaatatgatgaaagggacaatttgaaccatgtaattctggccttgagaattcagaaaaagttaacgaaatgatggagtaatggtgggggagcaaagacaactgccattgtggaacttcgggatccataaggagtcttgtgtgctgctgcagggacttgagaccccctgagttatggcctgaagaacgggtccacttcccaggagggttgtccactgacagagtctggcgtgttcttccactgggaaagtctggtggttggaccaccaaggcaacttccctcacggttaaagctcatttttttcactaaaggggctagatagatttggctcatttagaactcaaaacctgccaagaatgatgaagctcaagaggaagatttccagtttcctggcaagtgccaaacccagagtacccttgcatgtggtctcgagagaaaagggtatgtgaattctgtgagcactgcccactaactcttgctggctcctgggttctgggttcggtgaaagcaaaatcagagaaggaaatttgaaaactttctccagaagtcccagattctcccatcttctgggactcattcctcactcccaccaagagcctcctcctccctctcctgccttaagcccactcactctagaaactctacaattcttttttttttctttcaagtagtcaaataacctcattaagctttgtttcaaaccttatttccaggcttcttcagcttaattacctacaagtaatgaattgtatataagcaaaaatgaattgtatgtaagcaaaaagctgcagtgtccaaggggcttgggcttaaaaatattagagatctagattttaccagatccatatatcaactttataaagcagtcaaggccaggcgcagtggctcactcctgtaatcccagcaccttgggaggctgagatgggtggatcccctgcagtcaggagttcgagaccagcctggccaacatggtaaaaccccatctctattaaaaacacaaaaaaattagctgggcgtggtggtgggcacctgtaatgtcagctacttgggaggctgaggcaagataattgcttgaacccaggaggtggaggttgcagtgagctaagatcgcaccattgcactccagcctgggcgacaagagtgagattctgtcaaaaaaaaaaaaaaaaaaaagcagtcctaatgtaatatagcagctcccagtaatttctgcaggttttatcttcttcagaagttggcttaattcggtttgcctcattcttggaagcctcatcaaaattctctgcaagagctggaacttcatcatcatcctctccagtagcaaatggtgctttttcatccacagactgtttgggcagagcttcagcccatcttcccaaactagccagactgtctgcatctcaccggcttaagatgctgggtagcgtttccatcagctgctgtgtctcagcatggcctgcaatggtgaaagaagtgtttgctgccaaagatgcctgaactttaggattgttaaagcggatcactgttccttgatctactttaacttgtaaatgtattcacctcttcaataccagatattgtttgcccctaacttcttcttcttctttttttttgagatggagtcttgctctgtcacccaggatggagtgcaatggtgcgatcttggctcactgcagccctaccctctgcctcccaggttcaagaaattctcctgcttcagcctcccgggtagctgagattacaggtgcctgccaccatgcctggctaattttttgtatttttttttttagtagagacggggtttcatcatgttagccaagctggtccggaactcctgacctcaggtgatccacccacctctgcctcccaaagtgctgggattgcaggtgtgagccgctgtgccggcccctaacttgtttaagagctgaagtttttttaatcatctgctgtagctgttctgtgaaccaccttcttctttctacaaccaatttctttcccaccaatgcacggttgtgcctgaagtttggcgggtttttcctagttcatgattgtctctttcatcttgtcagagcagaaaaggggccatgcagggggcaggttggcactcagtgttcaagcagagttaggcaaacacacgcggggatgcaagatggcggctctgcgattcttacttcattctttagaacaaaataaatctctttctatgaatttccaggcgtgtacatcctcaggcctattttttcaaaaccaaagagtttatcaatatagccaaagtctatttatcgagagatttcacaaccagtaaaagtggctttaagatagtttttaaatatattttttttctctttacctgatttccattttcccaggtgaggaacttgaagtcagagaggttaagtcacttgctgaaggtcacagggctgggacgggagccagaagtgggtcaggattcaaacccagaaatgtctggatccaaagccaggctccagattttcacttccacctcccttctctccaaagaggagtaccgcatcactggagctgtccttaccaagagccaatcaaagtcaaggctcccagtggaactgccttcattcataattcccggtggagagaatctgattggcccagctgaggtcatgtgtcttcacttgggacagatcagctctggctaggcgggctgaggctgcagggcaaccactctgagtcacgagggccattcctggggaagacaggtgtgcgagctggaaggccatcccgagggggcctgctacggatgagcaaaatgttattaggcagaatcggttgatttcataccgctgcgtacactagcatcaatagccatgcagaatggtcataatattttaccaaatgtgctccgactccccaccctgagcaaactccctctggcccaagaccagaaaatggaaatgcatttcctcttttcctgtgctcaggcgtggggtgattacttggcaaatagccccgtcacatttggtcatctgggacatttttcctgcccagcggctcctcttcccagacagacccagagacattcctcaaaatgttctgctcaaagaagcatgtgacaaaacagcttgtcagtttgtctctttcctgccgaaatgagaccgtgatgtcaaaattcagtcctttactcatttagaaataatctgataatggagcgctggtttaatttcccggggaaaataagatacctcttgcctagcgaagctccccataaccccaggaagaggcataattatcttcttcagaatcaatcccttgtggatcccctaattaattgtaaactatagatgagagctgttcaaaaagtaagtttacaaggttaattactggtgtattatgcgtagcacaattttgctgggcacgtctgatagagaaactgatgatcaacttttccaagttccttctcactgtcaagtagaggagttgagagaaacaacacgaaagttacttctacctttggcaggctagttatcgaggtacaccagcattatcaagggaaatcagctctgcctatgattgtgtgagcccttggcccttatacactcctacacatgcaagtccaatcacactccatgtgcacacatgcacgagtgtgcatgtacacacgcacgtgcacacacacaaatgcatgcatgcacacacattagcaggtgttatgcaaagggcgtcagcgtcgaagtccagagaactgattttgagtctcaggtctcatgcattggggattttcttacttgaagacagagtcactcaaggacattctgcatccccctgcatagttccagcctcccattaggatcaggaacattaatatgatctgagcttagatccttctgcattcctctttgtggcaaagatatacacacatatttggagattctgagtcctcagggctgaacgacgcacatgatgcaggatacttaaggattggtttggactaattgtcacatgttatttcttctttttggctcctgccaggagcctaccagaacataagggcgctagacaggattccaaatgaaaaacagcccaatctttcatttccctcctctcctgatagagaccctaacagcttggcgaggaacgtgagttgctatggggatgagctgtgactaaatcaggtgggtacaggcaagggtattgcaacacagggaagaaagaaaagggaaaagtttgcttcttagcttgggcttgaaatattacaagactgctaaagaggagggacattgccctccctgtcccgaaatccctgcctctgcatgcctattccctatcccttcccaagagtggagatgttggtctgatgggtcagagcccatgttctgctagcaggcagggttgctgcaccttaagagcaggaccttggctggacaccgtggctcacgcctgtaatcccaccactttgagaggccgaggtggatggatcacctgaggtcaggagttcgagatcagcctgaccaaacggtgaaaacccatctctactaaaaatacaaaaattaactgggtgtggtggcatctgtagtcccagctacttgggaggctgagacaggagaatcgcttgaacccaggaggtggaggttgcagtgagccaagattgtgccattggacttcagcttgggcaacagagcaagattccatctcaaaaaaaaaaaaaaaaaaagagcaggaccttggcaatactccctcttcctcttcctgccttggactggaacaagcagatggcaagctgcagctcagagggtgtggagggagctgcataggtacggacgggagtctgagacaagccaaggagagaaagcctttgcctctgcctgtgacgatccccaagggtatcttagagggtgagcagctgcccccgaagaagaggggaaaggttgtggcagacagatcacggcgtgaaccagcgtgggagcattaaagagagggcttgtttggggactgctgggttacatgccagcactgggcagcattggggagagagaggtacaaagagccccgagtgtcaagtgaggactttggattttatcctacagtcaatgaaggcttctgagaagggaagtgacatgatttgtcctttgggaaactgagactggtggcaagtgtcaggaaaggctgggaagggggagagacgagggcatgctgagacagcaatcagaagctatggcatcatgattcaggagggaacggtaaggtggaggacaggtcatggcgctgggaacaagaatgactaggaaggtcaggcaccgcagggctcaggactcactgtctacagcggggagagagccagcggctgagatggctctggggtttgatcactgaggcctgggtgaatggtggtgcatttacagaaaagcacacagaagaatgcgtgacagcacacacacacacgtagacacacatgcatacacacatacacatgcacacacacatgcatgcacatgcaaacacatacatacacacatacatatgtgcacgtgcgtgacatgtaaacacatgcatacacatacacatgcacacacacatgcatgtacacacatacacatccataagtgcatgtacgcacatacacatacacatgtacatacatacacacatgtgcacatgtgcatatgcacgcacacatacacacatgtatgcacacacacacacacacatatacacgcacgcacacacacacacacacacacacacccttcactccccagccagtacttatcagacctctattctcaggaattctttccctcattcctcccatacatgacttaaataataacattaatgacaaatagggtcacacatcttttgtgcacagttatatccaattgaaaatttctctacctaaatagctctctgaggcaggccaatagaggctcagagaggatgcctcatgtcacacagccaaaagctgagagggtggagtcttgacttctgactcccagcccagtgcgccccctgccatactccactgaggctggaaggaaaccctgagatcggcttgaccagccctctcattacccttgtttatgacggtttgtactgtagtcaggaaactcctgttaattgttctttgtgctgccaccatcatatttccttcctccaaaaaggagtgcaggcagggagattattttgacatatttcccgaagatgccgtttctagagcacttgcctgataaaaatgatatatttatttgggaccgccaagagcttgctgaaatgaggaatttatctgcatagcttttgttattaaagtgattcttcttgtttatttccttctaagctactgattccatctataatacatgagtttcaggtaatagaaatttttcatgcaagtaaatattttaataacgatgttatggtcttgattcagtgttacaggcaatagcctggcacagggaacaagctcgataagggaaggctcgggacctgggttcttgtccccactctgcatctgtatccgtgggcaaaaccctgtcctctatgaacctcagtttccttctcagtaaagtggggtagctgctacataccctccctgactcacaagggccactgttaagatcagatgagatgacagccccaaaggttctggagaggctgcaggctttgctatacatgggtaggatcaacgtgaaatactgaccagagtacagacttaggagtataacaaagagactaaaaaatgcagtggcagcccaggcgtgggggcttacgcctgtaatcccagcactttgggagacca[132 bp omitted]gaggcaggggaattgcttgaacctgggaggcggaggttgcagtgagccgagattgtgccactgcacaatctcactctgggcgacagagtgagactccgtctcaaaaacaaaaacagacaaacaaacaaacaaaaatgcagtggcttaaatgagatagtgtctgtcttatgcaaagatgggtgtgggttgagaaagggtaaatggcctcattctacaaggtcattcggggcaggccagtcagcactgccagcctcaacatgggacttccatctctgtgtccaggtggtctcctaccatggatgtttcccaacaagcaagaaggtagcaaaagggaatcccggtcaagtgagtttgtctttaaggtggaactcacgtggcacttccactcacatcccattggctcaaatttagtcacatgagtcacttggcttctctgaccacaaagaaggctgggaaatgtagtttctagcttggcagtcatgtgcccagctagcacttggaagatagaatgaatagtaggagacacttagcagtatggggaaaatgaccactcaggataatggccacagatacggaagggcccacaagatcttcaggaaaagcaaacagtcaattgggtacaagcaggcctacactcacatgtctgcctcagatattctatgcacatttgtactcatatgagcactcctgcaatcagacaccggctcaggtaagcaaaataataagagtgaaactgagcatacctcctggctgtcaaggtgctgcagattcaagagatagatggtggtggggcctaaggtgaagcagccaagttggagagaggtatgtgagttcaatatctatcttacctttccaactctggaaggttggaactcaactggcatgagttcagtttgaggaccacaaagagggggagatctgaacaggctagacctgagaggatcacagacttcgggacatacctcaagtcagacatatcaccggtgttcactgctccatcaagctggtgaccattcaccatttcttttcccctaacggtctgccttcaccattttgatccccaccaaagtctgctatctcacacccttcagccacatgcattgtggcaggactaatgtctgatactccaaacgaggtgactcttgatcagattcaaccctgaaccagaatctttcaaatgttctccagggtctctgctctaaacccaggaaggaatgcggctgatgagtgcagcgcacatcggaatcctaccccggccaccagccccagctcatggcaggggttagaaacaccccagggaagaaagaaatgtcaaaatgtcaaaatatcaagttcaaagtgatcaaatgggaggcagtccaccagcacaactgtcacactagaagagggcgagtctctcccaaagtctgtaccttcaacaggagaccatcagaagagcttctggaattcaccatgcactattcacatatcactcaacatacattaacagctcaagtggattcacatcagctcaatcataattatttgtcaaaaccactttttccctcattatttcctgctgagagtgtgagattatacaaatttatgttgtagttatcacagattctaacagcatcacaaaggaagagaaattaaccccctacttattagaaaatgtttagctcaactctctaggagaagtcaatttactaggttaaattttctgaaattgcataaagatgctagtccaacaacccaccataacagagtggcattatctgctgttttactagaggacctgctgccaacaaccttaatgatttatagttaaaatgtatttatcaagaaattgtcacgctagttatagcctgaaccagagactgggacccacattctgttttctggaagacttgggtcttggtgaacaataataataataatacctatggggtcctttcagttctaggcaaagtttgttgtgctcagccagttacatacaagcatcgttcctcacatggaccatggccattctttcctaactgctctcccacatctacgctggcccctaccccaccccacccatatttcatggtacacccagagtgattagtcaaaatcacgatctgatactatccttctctcccactacagggcctttgcacaagctctttcctctgtctggaatcctctttctatccctcttcaccttcctactcatccttcaatttaagccccttttcattaggagcaaaaaccagtctttacaagggcctgcaggtacgtgtccactgtctgtatcatcctaacaggggtactcttgagagtgacatgagatgctgttaatacttatgccagaagtataggtacaaatgaacctatcctgggcaatccaggaccaggctctcctggcctggccctctccacctctctggtctcgtcgcctaccatgtgctcccttaattgctccaggattcctgggctccttgctgctcctcagtcatgcgaggcctaacacccaccttcaggccattgtgctggctattccccctggcttcccccagaagtcagccaaacaaactccttcacctctttcaagttgctgcttagatgtcaccttctcaagctcaccctgagtgtcctgatgataacttttatcatctgcttctttgcccaaacccatggatggcagagctgggtcatagtgacattgtgaatgttaccagctcatatcccagacatctgaaacactagcatagtcaacaattacacacactgattcactggtgtgtcctctctgattatggtgtatccctggagggtagctccagagaccccaggcaaaatgacccagcacagaattctggacctgtccttgtagagccccagctctctactctctgtccccaccatgctagggaaacctggctgacaagcaatgcccccagtcacagacttaacacttcaagtgtctgcctcctagatgacaacctgagcagctcagccaggcagcaggaggagcccaatggccccatggggatggagcatcctgtaagttggaagatgccctggagtcctccatgcccaaccgccctgtggtagtatacaaaataagaaacccaactcaaaccgaaaaatcaagggtggggaaggaatctaatgtctcatgtaattgggcattgtagtttagctggccttaggcatggtggggtccaagaggtccaatagtgtcacaggacactgtttcattgtgttctcactaaattcccagggagggcctccccatgtggcaataaagtggccactgccagctctagacctccatcttcctcacagctggtcataccagtggaaggagagaaacttttgttgcagcaaaaattccagagaaagctctcatttgcccaacttggatcacatgtccatggctgaaccaatcgctgagaccaaggcatgagatactttgattggaaggtctgggtcacatgctcaggtggaagagtcacccaaaacatatggttacccaaagccatgttgaacactcaaaaaattatatgtgtgtccctgacactcatctaataggaaggggctgtgttgcacaaagggaagacatgagctctacagagctttgaagtagatatctaagacttgactttgccactgtctctaggtgacttcagacaagacgttttattaatacctcacagagccttagatttctcaaatgtgatgagaggatgcagtgctctgctctaccagaccctagagcatactatgaggatgaaatgaggaaggaccgttctcccctagagatggctgaggtgtccatcgtcgggagtacaagggaacaggcatgtccatgtttctgaaccacatctccaagctccagtaggctctgtgctggagcatgagtttcttttccactaaacaactcgaaggaaagaacaactttgcttcccacttatttggtgtttagatgctgcctccctcccaccacctccacctgctagctgagaggcaccatctctgagcccagaggatgcaagatccatcactcctgtacagagttcacaccatgcagctgtgacctgagcaacacatccacaattagctaatatggatcatttttaacagaaaacgaagcatgaaatatgcaaacataatgagcccttcactgaaattccagtagctgctacagggtaaccaatttgaatagcagttgcaattcccggggaggaaacccccattaataagaacaatgttgaaattgttatgtatggactctgaaactcactcgataattaatccagtcgataaacatggtattagtcctcccacactatgcaacttaaatgaggcttttattgaaatattgggtccagtttcagacttagcagctaatctggagcaagtggggatgttggcaatggcatgaagaccaatgcaagagccagagtgagtgacagaagacacagcttgtcttgtaggcctagagaagacctccatatcaccaggctcccaacataacaaaagcccagtatcaagcactggcttggatgccccatgccaagcgtgtgccaagcttccaaacagtgctgtttagaggtcactaattattgctaattattggtcttcccaaacccatctgtgtgtgatgggtagcaacaccatgtatgttttcagagctcactcagttttttatttcctgccttcctggaaccccctctagctggtagaagagagacattgaaagcatcaggcttgggtgttggaccaaggttcaaacacaggctcagccactttcttaccagctctttgccctgcagtttatggaagtcctttcccagtctgtaaataatacaagtgcctaccttttagggatttttctgaagaataaataacataatgggtattaagtacacccattatgtaggtacagcatgcctaccttttagggattttctgaagaataaataacataatgggtgttaggtactcagccatgtgtctaactgggacacattgctatccatttctttcacccaagactggttctcagaggcatacaggtaacaagttgctctgcaccaaagtccgtttctcatgcactcttttatttctttttctttctttctttctttcttttttttttttttttctgagagagactcttgctctgtcacccaggctggaatgcagcagtgctttcttggctcactgcaacctccacctcctggattcaggtgattcttctgcctcagcttcctgagtagtgggattacaggtgcgctccaccacccacagctaacttttgtatttttaagagagacagggtttcaccatgttggccaggctggtcttgaactcctgaccttgtgatctgcccatctcggcctcccaaaatgctggatggcaggcatgagccactccttcgcatgcactctacagcattcaggctggagttggctcctgatatcacgaggacctggactgcaggaattaggaagccttctgagataccacactcattgcatgcaggctatacttaaagatccattttatgaaatgttagccatgagttgacaactgttgaaactggatggtggatacataggggttcattgcactgttctctctagtttcatatatgtttcattggtttgagttttttttttttaaagacctatctaaagtgagtttatttgggttttttaattccacagctaggagcaatcctggcaaattcatacctgggcatttctcttgccactctgttgaggaggcgtctcggggttcagtcgccaggacatgcctggtgaagcttagatccctattgtgactggcaataagacaaggcaagtgtacttcaggagaccctaccacctccattgttttaagaacactggggaacataagtaatccgagtagagatcttaactaagaaacaaattattaactattaacagatgaaatgcaatgagattctaattgatatatttcctaattgttccttgcctcaggtcatatgatgcataactggtataattaagaatagaactcaagttttctgcttctacacaatagaactcaagttttctgcttctacatctggtatttttttctgctatatatacagatacttctgtatctccagtggctctaacatgcagccattatgctagcaagcataacaatagcaacaaaagccatagcaggtaatatttattgaggatttcctctgccgtgaacttactaagctttttaatgcataatctcatttaattctataaatacatttttaaaataaaataacttttgaagaggctaatattattatccccattttacagatgagaaaactgaggcttaaagtcatgaagtaacattgaagtaactaattgtatacagccttggaatggtaaggtttggcattccgcctcgatctatcctgtatgcatctggaagtgcctggttgctgcacaagagtctagagtttatttaacagcctctattaggcatttgggctctttccaatttcttcattctcacaaatgatgttgcaatagacatccttgtacaggattcggatctcacgtctgtcttttctgttcagtataaaagctgcccacgatcagggatttttgctcattttgtgtacttcttctgatcttcagtacacagaacagagactggcataaagtcaagtcaataaatatttgttgaatggatgtaaggatggatagattggttgatggaagggagagaggaaggacagcaggaaggaggaagaaggaaagaaggaagggggaaaggaaggaaggaagtggggaaggaaggaaggaaggggaagggaaggggtggatggctggatgggcaggcgtatggatgggagtgggattaattctccagtgtagacacccagaagtctatagatcttgcctctgaggaccacactgttaggacagtgatcctcaactttggctgcatcttagaatctcctaaagactttttttttttttttttgagacggagtcttgctctgtcgtccaggctggagtgcagtggcaggatctcggctcactgcaacctccacttcccaggttcaagcaattctcctgcctc[209 bp omitted]tggtgatcccctctgcaaatattcagatttaacaggcctgggatgtgacctgcgcattggaatgtttaaaagctcctcaggtgatttcaatgagcagaaccgctggatagggcaaaactcttatcattcacaggagcacgtgttaaaaagccaactatatcttcccattgtaagaaggcaaccaggccatttcacttcttggctttagcactttagaagaattgaaagcagaaggcctcctgaagacagctcttctccatctttcgtgacatcagggtggtgtccctgaggggagagaggcgagtgagcttccccaacctggaatgggaagggattggcagtctcacagcagtcaagggacctttagaccctagatggtcctgtcccactccccagacctacaaaatctgaatctctgggtatagaacccagaaagctgcactttcaataagcacttcaagtgattctgaggcaccgtaaaattggaagaggactaatctataaaaataggtgaagcaagattaattctaataacatgaatcagtccaaaccttcattctgtaactcaaatattcaagaaatattacatttctttattttctttaaatctaattaaaccatactttgtgactctaccccatcactgtagcagagatgccattgttattcacagttactttggactgattgttaccatttcatgttgtgtcttctatttcttctggttgttcttcttgtctgcccaccttacttcttacctattattgggtggactaagtatatttatcacattttcctctctgatatttaatatttttccttctaatagttttgatttttacagagaatgtccttaaatatttcatattcatacttaaacctatattacctgtcggtatctagaagtaatcagtatctatatcttctccctgaacagaacaaaattctgagtattctttgcttcctttcacccctctccgtataccttccctgtctgttgtctcacagtacatcgtctaagacattaattccagcttgctgttattcttcacaatcaaatattacttatcttcaaattttattgtttttttgcataccactgcatcttgtatcccaatgtcttcttcaattcttctttcatgtctagtcattttttcagatggattatgagaggtaagctttctgggtccttgctcaactgaaaatatctttaccctccagggcatttgaggcaaggtatgtaattctagctttaaattaccttcccttagagcttggagtacatggctccttctattcttgtattcagtgttgctcatacttgttattttatatagactctgtttctctgtttcttttttctctcgtgccctttctgaaaggttttatgatctttctctttatccttggcgttgcaagagttttctatgatcggtctggcgtttggtgcatattttactcaacatgtttgaccctttggcaccttccaataacaatgacaataacattaatgttaatagcttgcatcgagttttttcacatggccaggctattctgagtgtgctttactcaggtgatactttccacaccctatgttggatactatcattatgcccattttacagaagaggaaactgagccacaagaaaagcatatctttcttcagtcgggaaattatttattttagaatttcctccatttctttctttctctctgctaattcccatttgtcaggcattggaaattggaagtcaatctcaatgtttgatgctttgtccttgggcagtgtgttttagatttcctcagcttgatggttgagctcattgatccccatataactgtgacttttctgagactgagtccatccacagaggcctgcaaccacacccatcactgagacaagaaagaggccaaactgcctgtctgcttcaccctggtagttgccccctggctctctccttgcccccatcagccgtctgcacacccatagactcataactcccattttttacagcagtatttgctgttaattctattccatttgctttctatcctctaaaatttttgttaataatgtctggtccatcaaggacatgctctttgctttaaatgctacaataaattgtttatatctttttatcatttctagggatttggatcaaaaagataaacaagtgcttagttcaccaactgacccaatctccttctgatggatgcaaagagcagagattctggtcatcttgagaaatggggattcattgaggaacatgtctaaccatgaggtagacaggtatctctgacttgtgcccacgccttccagggaaaatagagagcatggcctggctgcatctcaaagggcctggaaagctctttaagaatgggaaagcaggttgggcatggttgctcatgcctgtaatcccagcactttgggaggccaaggtgggtggatcacctgaggtcaggggttcgagaccaccctggccaacatgatgaaaccccgtctctactaaaaatattaaaaaattagctggatgtggtggcaggcacctgtaatctcagctacttggggaactgaggcaggagaattgcctgaacccaggaggtggaggttgcagtgagcccagatcatgcctctgcactccagcctgggcaacagagtgggactccgtctcggaaaaaaaaagaaaaaaaaaacgggaaagctgtgcagaattaagaccctctcatggtgttgtaccaacccttcagctccggaagctgaggatggcagctctgatgctctaccgctaactctgtctctacttgtcctcctgctgccatctgatgaagtcctctgtatcctgctgccatctgatgacgtcctctgtaccctgactttaaatttctgagaggaagactctgattggtccagttagtcattattattcttgtggcttcgacaccccctcagcccgacaaacccatggactgaccaccttgagatccaatgcccccacggctccaatcagttcaagttttcatggtgggagccacgtggtcgccatatggaaccccttgaagtggactgtggttgaggctgacgctctgagactcatccttcccaaagcaatgtctaaggatcctcccagatgtaaatatctggggcctgtaagtgtatctgcaggctcacgaataagcccaactcatgtttatacaaactacccatcaggaaagaagaaatgctcctgattcccatttctgatggttaattttatgtgtcgattcgactgggcaacagggtgcccagattaaacactgcttctgggtgtgtctgtgaggctgtttctggatgagattagcattagaatcaatggactcagtagattgtcctccccagtgtgggtgagtatcatccagtcaatgagggcctgaatagaacccaaagggacaggaaggaggaattcatcccttttgccatctccctgcttgcttgagctgggacatcaatctactcctgcccttcagctgggccattggctcccctgtttcttaggcctctggactcagactggagtaacaccacaacaccacaagctttcctgggtctctagcttgcagaacaaagactgtggaacttcttagcctccataatcatgtagccaattcctcacaaatatatgtgtatttattcatgtgtaatatataatatttctgttcatttttttctctggagaaccctaatacgccattagatccatgttcctctgagaaatcagcatctctacaaacccaggcagtgagctccatgacgaggatttagctgatgtaagggaaagttttgggttagaaataccagagttaacacccccaagaaagaggttataatgcttcggaaaaaattcacaagcggggtaagttcctggttcataatactacacccttctctaggaattaccccagtatatgctattaatagtaaggtccttttggctttaagaccgcccctctccactccccacttgaccaccgatgactggttgacacagggttgagcacctgacccaagctgggccaatcaaaaatttctttctccttctgagaatgtgaaatttaaaagaatacccttaactaatatagggcccacctcagagcagaaaccacatggcacagcctctgctgtaacagacaatctgcaaagaagtatcctgattgattataatttctgatgcaatcaatctctttgatccatgccttgaccactgcctaagccatgaccctagctacacactgaccttgacttcagccctcactgagccttattcctggccagatgttgaactctggcccctgccacagaattaaaccctgacgtggtcatagatgattctatgccttcgtcacaaactgaactctgacccccagcaacataccaatccttgactctctctagtcaccctggaacatacactattgtcacaagtggccacggtatgcgatggtttccctccacacaactgggggtacatcttgtttaccataaggcagcctgcccgggacctccaccccatgtactgagcatggctaatctctggatctgctgctttgactctgggcccagatgttactggtggagttgcatcctggaaacattctctcactgtgggacccaatgcccagaacgacggccacaatctgttctttgacctaaaggaatctggcatgagcagacatagctcagactcacacaacctctctgcaagaaaacctaagcaaacgccagtggttggaatcatctaaagaaagacctgatgattatccagtcaactggaaggtcctcagagtcagcctcaacagctctctcttctttgtaccaacacctgcttgttttcaagatctgtccattctacatcccaaatgcttcccctgtgaattccttctctccatcttcacccaattcttccttggtacaagctggcacccacagcctccttactaactggaattcctacttccagtctcaccttctcctccctgaccctcaccccaatccgtcaccaagtgtacttgcaaaaaatcaaatacatgctcattaatgcccttctgctcacaacttgtctgtggcttcccactgccctccaggtagattccagcttcctgggcatggcattccaggcccttcacgatcgggtctaaagcgtgaatctaaggaagaagagagcttatttctcatgcagaccatttgtccccaagtgcttgtgggcctccactcaaacccttctgtggaggagatgatggctttatagttagaatctgtcatttcctaaagtggagagtggtggtgcggggttgggggggggtggttataattatacgtacattgcaaattaaagctgttattaatcaaagcatccctaaaaatatcaaagacgtaatgtgacgtctcagagctcttgtcccgctggctccagtgcagatccaaaaggaagctgaccttttccacagccggattataaatgtcaggattgcatggtaccatccttcaattactgtcaccttgaaaggggagagcgctggaggcctcacacttaagtgttttcaatcacagatatatttcaaacactgtctccttgagagaggagcactgggctctggaagctggtacagcccccactgtggcttctgtgtcacgtgcagtgacccagaaagttagtaacttaaaagacaatttggagttgatcagaactgcccatttaatcccctcctgttccaacaaactaaagatttaattattcttcaattgctatttgcagaagcaccacaggacaaagatgcctccatgaggtatctcctaaatacagatcaccgtagattgctttcccctttacaaaatcacgtttttattgtgcagctttaagcaagataaaaactttccttctggtcatatttctattcttcattcaaagtctccatgcaacaagaaggcagagagggttgagtccaataagcaggaaaaaccaattcaatttccaggcggatctgatgctatgatatttatagaacacacatatcacattagcatcttgccatgctataatataatttcttcatctgtctcctgtaacctatatttacagtagggatattttcccttctgcacttaacaaggcatattattgaattttagttattataaaacatggccaatcaatataattctctgttcctcttttttttttttttttttttttgagatggagtctcactctgtcacccaggctggagtgcagtggcgcgatctctgctcactgcaagcaccacctcctgggttcacgccattctcctgcctcagcctcccgagtagctgggactacaggcgcctgccaccatgcccggctaattttttgtatttttggtagagatggggtttcaccttgttagacaggatggtctcaatcttctgacctcgtgatccacccacctcggcctcccaaagtgctgggactacaggcgtgagccacggcacctggcctgttcctctttttaacagaacatcctgggtctaatttgaactgggaagtctggccccatcacaaagaggagagttgtaaattcaacaggcctcaccagggagctttgcttcactgtggccatccttcacagccaaatacattctgcttccaagttcgatggtgccagaactccgggtggtcatcacggtggtcagagccagtggacagcctgacccatgagctccaccagctggtggttggcctatatcctggcccatttcactcagacacatggcagaacttgtccctgccttgggatcccagtgactcagattcttcacccccagccccagaaagcaggaaacaagcatagctgggaggaggatgtttcatagggcagacgtcgttgatcttaaacccattctccaaaagcctttcccatgcttcaaaggttgatgtggtgattgtttagagtgcagtgaaaagactttagaggaaacagcccagaaccagactgtgaaccatgcccagtccctcctcacgtccacactacacacaaatcctgttggttacgccttgaaaatgtactgctacatgcccaatggatgggttcagtctcttcgtgggtgccagcccaataaccacaacaaagaaggacttaacaaggggattttattacttgcagcaagtaaggggaccacaggggataattcctaaaacagtgcctcctaaacagagggctgggtcaggttttataggcatgaagtaatgaggcatgatctgattggatcttgcaatgaagtgatgctgggaggcatgatctgattggatccttccatgagatgatgctagggattgacctgattggatcctgggtcctgccatgtccacttcttaattcagtcccccgatcgtcagtccaagcccttaggttccccctctggctgcacacttggttcatctgggcatgctcaggttatgtgaccttcaacctgagggtcacggcaactgaaaaacaattcataactttgtttcttacaagttgaaccaagctgggctcagtggcttacgcctgtactcctagcactgtgggaggctgaggcgggaagattgcctaagctcggagttcgagaccaggctgggcagcacggtgaaaccccatctctgctaaaatacaaaaaattagccgggcatggcagtgtgtgcctgtaatctcagctacttgagaggctgaagcaggagaatcgtttgaacctgggaggcagaggttgcagtgaaccaagatcatgccattgcactccagcctgggcaatagagcaacactccatctcaaaaaaaaaaaagttgaaccagattggaaccagattggtctgataaggttacagtatcaagaatccaaacatgtctgaacacctccatgactacaccctggtccaagtcatatctcccctggccctttgctgagaccttgtgactgcctctcagccttggctctcacctgcccacactctatcctcaacagagcagc[131 bp omitted]tctctactaaacatggagaaactccatctctactaaaaatacaaaattagccaggcgtggtggtgcatgcctgtaatcccagctacttgggaggtcgaggcaggagaatcgcttgaacctcgtaggcagaggttgcagtgagccgagatcgcgccattgcactccagcctgggcaacaagaatgaaactctgtctcaaaaaaacaaaacaaaacaaaaaaaaaacacagaagtctgatcctttcattcttacatgcttctgcttcaaagcccttcagcgggctccccatctctctcagaagagaagtctcccatgagacctacaaggcccaatggcctccagcttcatccctctccctctctccatttcagcccagctggcctctgctgttccttgactgaacagcatgcctggccccagggtctccactggtgcgattccctctgcctggactggtctcccaggacccacgagacctgttccctggccatttcaggccttctctgacaatccacttaaaataacagctgccccaccccagcatccccaccctgtttgatttttcttcaaactatttatcaccatccaatatgctaaatatggtccttctcctcccactagaatgtatactcaactagggtagggattactttcaactttcttggcttaatgtttatttcatttctattttcatgttttctaacattttatcactaattttttcaaacataaggaaaactcaaacaattgtacaatgaacactcacatacccacctcccaggtgctacaattgttaacattttgcaacatttgctctttcccatatctaaccatctatccaaccctctatccatccattaacccattttggtttttttgtttgtttgttttttgttgtgttgtgttgtttttgttttttgagacagagtcttgctctgtctcccaggctggaacgcaatggcacgatcttggctcattgcaacctccacctcccaggttcaagtgattctcctgcctcatcctcctgagtagttgggattacaggcacctgccaccatcctcggctaaattcttttgtatttttagtagagacagggtttcaccacgttgaccaggctggtctcgaactcctgacttcacgatctgcccgcctcagcttcccaaagtgctgggattacagacgtgattagcgggcctggccaacccaccttgtttttgccggcactccgagtaagctgtagacatccctatgcttcaccactaaatctttcggcatgtgcgtcatctactaaagttcgagatcggtataaaactcctttgtatttttggagacaaaatttacgtcaagtgaaatgcacaaatcttcagtgtgccactcaagaagctttgacagatgtcaaatgttactcgtgtaacccaagcctttaccaagatacagaaaattaccttcacccggaaaattccttcatgccccttctttgtttatctccagagaacagagacctttatctgctttgttcactggctgtgttccccggcactcagaagggtgttcggcacataacagatattcaaaaactatttgtaggataaatcaatcaatgatcctatgtaggggtcagattcaagggaattgagtttttagtctctaagatcagctcttgggctaaaacctggtttcatgggagcataaataaaattcctgagcgcctagccaggtctgagggtacaaatgaaactgcagttctggaccatacagctaggatggggtaaatgcattccaaggaacccctcccatctttgaacatatgcccagcagcagtccagcctcctgaagccaaagaccattacacactgcttggatgcagcccgatcaacagacacggcagagccaagaaggggtctcaggagggggtttagccactccccgcaaggaccagcagcccccaactctgccacaaataaaagcaagaatgatattcatattttttgagatggacaattgatattttctcaatcttaggcaaagtctgaataaaagcactttttttttttttttgagacagagctttgctcttgtcacccaggctggagtccaacggcacaatctcagctcactgcaacctctgcctcctgggttcaagcaattctcctgcctcagcctcccaagtagctgggattataggcacccaccatcacgcccggctaatttttgtatttttaatggagacaggatttcaccatgttgaccagcctggtcttgaactcctgacctcaggtgatccatctgcctcagtctcccaaagtgctgggtttacatacgtaagccaccgcgcccgaccaataaaagcatacttaggaaaatgtttttattcacctcaatgatataataagttttttttaaagtgtatttgctctgccataaagctttaagaggagtcccagcaccacttccctccggattgctacacctaaattctcctcatatagaaagtcaagaggcaacaaagaaagcagtggacagaacatggttaaatagcaaatatttcccctacacacacacacacacatacacacacacacacacacacacacacacacacacacacacacagctgctccagaagagactgtttactgtgctaagtaggaagaggcagcatccacatttctgtggattcagtgagaaagctggagagggaaactttcaatcactgctaaaatccaggtcatggaaatacagacccagaacagaaatgcacagggcaagacagcagagacagctacagtgccaggaaagcaaagagaggttgttccagggcaagatgagtgacagggactatgtggaggggagggcttggaaggcagagggacgtagctggcggctgcctgcccaaaacaaaaacagtgagccatggaatatgcaggctctctgcttggtgcctaagctggaagccatcacccacatacaaagaatttcagtttgattcaactcagcacacatttactggacattcgctctgtgccaggtgctggcagcagcccatcaagatacatgtggctgtctccagtctcagacagctcctggtgaaggtggagagacagagaacataggcaacagtacggtgtggccaggctctgatgcacgcagtgcccaagctgccgcagtgcctgttgccaactggtcttcctagcacagcctggggcaggacaccaggaggaggatgcctgagatagacccaaacagctctctttctcaggaattagtccccctaattcctgattcttgctggatccgcaattgacagcatacctcgtggaatattacctgtagttgagtatgcagatgagtatggtaactgtaaactgtttcatgttatggattcaaggcttaggtcaatctcagttaactctttggccaaaggcgacctccaggtcaatgtcagacaggataggcccattagacaatagcaatctagggctggaactgcaagcgagcagcatgtatcagaatttctaggggataggacatggagttggaggtgcagatggagattgtcatggatgttctccaagcaccagccccctgcaagaaaaccctgcttctgggggacttctccaggagctgagggccagtggagtacaaagttctgcatgcactcctcaagtggactagagaaagcctgtcatgggggcagtcactctgtgccccttccctccattcccgctgccaccttcttggtccaagacattgtcttctctctcttagacagttgccatcatcttctaagtcttctttttcagtcctgctcccatgttccctccagagggatggaatcaacttgctgatcagatggggtttggagccatccctgtaaagaaacctgaagacattcccaattcctctgcctggctttccatgtcttccatgtccagcttcatctcccactgtgcccttccataccctggcctctctttcccgggccaccagccctcatcttctcagaatttcttgcagtctccccgcagagaccacctccttgtagaaggctgccaagattctaccactaccctagctggggataccctccctccctctcatacagcacattcatgtttttatcttgtgctacaatgatctgtactcctgatttatcttcctcattgaattccttgatatcgtttcccacccagaacctcatacagggactcagcaaatgttttttgattcaataaactctgtttttcagctttgatgctactggtgtaactactctcttaggatttaccttccctgaggggcagcctggtctaaaagtcactccattgtgcactggatgaagggcccaggaggtgagtgagaacatcaaagtgggagtggggccaggcaggtgccactcttggcagcttgctctccccagctctcctaaagccagggtcagagcatgagccccggatgggaggggcatcatcctggacctgatcaggcctagaagagcttgcgttctcaaccgaggctggtctttaccaagatcatccccaacgacctgccctccccagccatctttcctcccatatgctacaccctacatgtcttgcaaagctgatgtcccctgtggctccttgactgttcatgtctctctgacctctcctttctcagaccatgggtatgtgagcagctaggatcaaggggcatgagatttagtcctgacgacatgatcattccatgtgtgaatctggtttgcccctttagtccgataatgccaggatgtgcctctttcacagtagcctttatgctctcctgagtacttggggtatacatgcacctgtgtgtgtgtgtgtgtgtgtgtgtgtgtgtgtgtgttaaaaaatactgctccaggatttcaaggaccacatttggttccattgttttctttaattgtggcaagctaagaagaaaagaactgcaatgcgcatgctctgtagatggacatgcttcccatggtcattacaccagaggagagtcgggcacagctcctccccctgccaggctcccaagatccatgctccaatgtcaaccctatgctcacagggagagccttgatttaagtttggtaaaacgatatcccattaaatttatgttgttaatttgaattttattgatttcgttgtttgccgttctataatttgtccatttgttttgcttttatggtcataggagagccatcagcagaaagattttactccagcttgcatgttggtacatatttaaatagcattataatagaaattagttgtgtcaacaaagagggagaagttctttgaaagtattttcatttcaaaagaagagccaagcattgctaggatttgagaaatattttatttaatgttgtatttcccacgagaggatcatgagcgctcaactcttcccaaccccagctgactcctccatgagaaatctgtcagtggttttcccagaaggctgcccccgtgtgaaattcaaagatatgtagtgtgttaaggccagggtgttgctctccgaatgcctccaccaggaagaatctgggacccagcttctgcccagttacaaatgaatgggacaaagtcatgttcactggaaacttgcctgagaaaccatctgaggacgtcattgtgcgtccatcgttccgagaaaacatgagctgtgaaagaccacaggacagatgcagaggactcccctaaattatctaccccagggagtgctggcatttctctctatccctgatgccagcaaatgcagccacgcccaagagattttttctttctttgtcccctacgagaagaagatatggagactatgtggttattaaagctcttagcagagcaccaagttcctgggcaaataccacacagccatttatctttcactttgctgaattttctattttaattggtgtatggagtggagcgtaaagacggtgggaaaatctcagcaaatgcatcagtgaggccgttataaacatggctgcataaacataacctgcaagcctgggaaagtcagggaatatttaatcaaccatagagtgtgcccaagaactgatctcccatacctccctctgcagcctcatctcttacttcttttttctttttttgagatggagtcttgctctgtcacccaggctgcagcacagtggcacggctcactgcaacctctgcctcctgggttcaagcgattctcctgcctcagcctcctgggtagctgggactacaggcgcatgccatcatgcctggctaaattttgtgtttttagtagaaacgggatttcgccatgttggccaggttggtctcgaactcatgacctcagctgatccacctgcctcagcctcccaaagtgctggaattacaggcgtgggccaccgcccccagtcacttttgttgttgttgtttgtttttgtttttgtttctgtttttttgttttttgagacggagtctcactctgtcacccaggctggagttcagtggcgtgatctcggttcattgcaacctccgtctcccgtattcaagctattcttctgcctcagcctccaaagtagcttggactacaggcatgcaccaccacacctggctaattttttgtatttttagtagagacagtgtttcaccatgttgataaggctggtcttgaactcccgaccccagctaatccatctgcctcagcctcccaaaatgctaggattacaggcatgagccaccaagcatgacctcatcttttttttatttgttttttgagacagagtcttgctctgtcacccaggctggagtgcagtggcacgatcttggctcactgcagcctctgcctcccgggttccagcgattctcctgcctcagcctcctgggtagctagaactataggcgcctgccaccatgcccgtctaatttttgtatttttagtagagatgggctttcaccatgttggccaagatggttttgaacgcccaacctgagccgatccacctgcctcggcctcccaaagtgctgagattacaggtgtgggccaccgccttttgagacagagtctcactctgttgcccaggctggagcacagaggcgtggttcactgcaacctctgcttcctgggttcaagcgattctcctgcctct[131 bp omitted]tcttggcctcccaaagtgctgggattacaggtgtgagccaccatgcctgacctcatctcttacttctttcacctctcctgctacatcccagctccagcctctcgctcgctgtgggacctttgcactgctgtccctgctggttagaattttctttaccctctctgtactggctgaaacttgcttgttttttagccctcagctgagatgttacttcctccagaatcttcccctacccacaccaagactagaattagtgcccctctcctgtgccctgcaggaccttgtgtgtgccccctttggtagccatcacacgatggtgccatgtggctatctccccactagactgcaagctcctcaggggcagggccttggagccctttaggttccacattgcagcacgatgtccactatatgcaggtactcgggaaggatttttgaatgggtggatgggccaggc[137 bp omitted]gtggcaggcacctgtagtcccagctacttggggggctgaggcaggagaatggcgtgaacccgggaggcacagcttgcagtgagccgagatcacaccactgcactccagcctggtcgacagagcaagactccatatcaaaaaaaaaaaaaagaatgggtggatggataaagtttcagaggaaacgcttatgactagacaaagaggatagcagtgaccctgtggtgccagacatcccctttctcccctgcctctttcattcccagatccacaactgctgggcacccttagcttgctgccatgggttctgatcttcattccctaagcaagaagcactaaagtagatagagatccaggtatctaagctgtcaggcctcctgacatacaccccatatccccccagttggcctaatccagtatccagaggaaattgctaagcccccatctctgcaacacaggactctcaataggtttgaatggcagatgatgaagaatagtacttgggacccaagttgctaagggccatcaagtttatacgggtggcctttttggttctttctctgatcactggccatttgtaccccaactatttttttagagatagagtctcaatctgtcactcaggctggagtgcagtggcctgatcatagttcactccagcctcaaacttccgggttcaagagatcctcccacctcaccctcccaagtagctcccggggtctcactatgttgcccaggctggtctcaaactcctggcctcaagcattccctccacctcagcctcccaaagtgctgggattataggcatgagccaccatgtctggccatgcaccccaatttctcataaaaatggggcctcaacatggttttgcctgacccagctctgtcagaagccagcctggagaacctgctgccagggcagacttgtaggcgactgccaggatgaccaagttttgctgtctccagattcctcacctgccccagttcatgcatcttgaaatcactccctggtaagataacaaattcccccacccttctgctctgtggccttatcaggctatctgaaccccaaagatcaatccttaaggctactagtcagcaaaacccactctgtccatggggcaggtggaggccgggtcagggcctctactgtctagtctcttttccctgttgtttttctgtgtgagcacaacctggcaacttagaacttagaaactctgtttctaagttagaaacagaaaccttagaaaccttagaaactctgtttctaatctacaacagtgtagaaaacctccaattcaagccataaaagttagtttctctgcctctaacattctactagaaaatgaaccataatttgaaacatacagtaaaaagtaatctttcctttttaacacccaagctccttcattttcaaagaaagccaacggctgttggattggattttgttttttaccagttatacattttgcctcgaaagctgcccagagtacaaaaaagaagtgagggtgttcacactttgaagatgaatcatctccaaagctggcatcagaaccccccatgttcatcaccccagtcttgagacaaactctgtagtcattaatgagagtgcataagacaggctggagttatgactagcatttattcgctgcagtaaagaatgtcctctattaatgacaacagctgtcggtttaataaccccagaaaagatcattaaattccttcacatttcccagaaacagatggaagaattgcaaaaaggttcaagcatatggggaaacatattggatccagcagctccaaagaatagccagaaaactgatactctaatgggctgctgcacacggtattgcctgtgggtgcccaatgggagcaggtgtgctccctgccttgtggggaatgtggaaacatggtgaggagtagtgtcaagacaggtgacccctgagtgtgctaggatggactggaaagacagctgcctgagttagtgggttgtgaaggctaagaaggtgactaacgtcagcagccattggctgcaaacctactttgctgccttggtgattgttaatggcaccatcccttggcagaataaacacactcacttttccatgcacgctctttctggtcactgcacacttactccaatgcatacagacatacccaggtcatcaacagatagcccaatgcccttgcagacaaactcctgaaacttgcatcagtgaatttattctgctgaagaaacctcccatagtcagagcccatcagcttgatcttcagttcagagtcagcagtacctgtctacttttcatgcatccaggtgaaggaaagcatttcatgacctctgagtcaggtgctcagatgattctgtgcacttagagagaggcagaagtaacaatggaggaaatatagagttatcaaaaaattatctaaaaaagaaaaaggttacagggcctgatggttttactggtaacttctttcaggctttccaggaagcattaattcccattccaaataaactgttcttatgtatagacaaatacagaaagctaagctcttcattctatcgaggaaggatggtcttgataacacttatataccataaaaagaaaactaaaaaccgagttcactttaaaatgcagacataaattcctgcataaatagtggcaagacaaatttaaaatcatatgaatacataagttggtattctttgaggtttgtctgaaaggtttaatgttataaaattaatattgaatacatatgtaatgtttagatggaaatattaaatattgaaaagatttatattgtactttttcaaattaatttatttgtgttatgagttaaattgtggctttccaaaaagagatatggtgaagttattaccaccagtacctcagaatgtgaccttatttggaaatagggactgttttgttgttgttgttgttttttgtttgtttgtttttgttttgagacggagtctcactctatcacctaggctggagtgcagtgccacagtcttggctcactccaacctccacctcccaggttcaagcaattctcctgcctcaacctcctgaataactgggactacaggcgcccgccaccacacctggataattttgtatttttagtagagatggggtttcaccatgttggccaggctggtctcgaactcctgacctcaggtgatctgcccgcctcagcctcccaaagtgctaggattacaggcataagccactgctcccggccaagaatggtttttatattttatatttgtgtgtaaacaaaagaaaagaaacaagaaggaagagggaatggagaacaaggaggaggcagaggagagaaaaaagatagagattatttgttgctcagaaagcaacatacttactacttgactggtcacgaaacaattttgctgacccctggtttcaaacaaccctgataaaaatccttgtagataaacgtcagttgatctggaagaagacacaggtgaaattcttaactaagaaaactttggggaaaaaaaatagttctcactcataagtgagagttgaacaatgagaacacatggacacagggaggggaacatcacactccggggcctgtcgaggggtaggggttaaggggagggggagcattaggacaaatacctaatgcatgcagggcttaaaacctagatgacaggttgatgggtgcagcaaaccaccatggcacatgtatacctatgtaacaaacctgcacgtttagcacatgtatcccagaacttaaagtaaaattttaaaaaagaatacaaaataaataaatacataaaaagcctcatgttaccttgagaagaattctgatgcccaggctggtgaagaagggctggacaatggaccctcttcctaggaactcccaactacactatttcaggacatgtgatctgctgaaatgtattttattttcaaggtggagggaaaaattgtctgtttactaaatgctgtgcaggatctgacagtctacgcccttgtctacaagtaccgcaaaactggcatttagactgtaccagagtggctgcctgcctggcattggtctggtgcacctgtgtgcgctggtgatgggatggtttgggcaggtgcagatccaaggactgtggtaaaagggagagcttgtattttgaagtggaaaagaacctaagggtttgtacagacatctcatcttcccagaggagacagacattctgggtctcattgtaaagtgcctgctgcatcaataaagctcttgacttattagaaaaaaaaactacaataactaaaatagaaggactctaaggaaaatactggcatacaaatcaatgaaatatgttgcctcacccttaaatgggcttaattcataataagagataaatatataatattggaagtatcagaaacttaagggaaattgaagtaggagaaaaataaattattagatcattacatcacactatatgtcaaaataaattattggctaattaaaacaattaaatgtaaaaaaagaaacaaacaatctggaagataatatgtgtcaatatttaactgattgctgtgtagggaaaaattttccaagcacaaagcaatgggtaaaatagtaaagaagaagacctacagatctgatgagaacattttcaaacttctgtacctcaagagaatcataagcaaaactgaaaggtgagtgacaagctaaaaaaaattgacataattatgccaaaggattaataaccttcacatattaaaaaatcaataagaaaagcactaacactctaataaaaatatgggcaacagacagaccccaacaactcacaagggatatatcattagctaaaacatatataagaaatagtcatcttccgggccaggcacggtggctcacacccataatcctagcactttgggaggccgaggcaggcagatcacgaggtcaggaattcaagaccagcctggccaacatggtgaaatcgtgtctctactaaaaagacaaaaaaatagcctggtgtggtggcagtcacctcccagctactgaggaggctgaggcaggagaatcatttgaacccaggaggcggaggttgcagtgagccaagatcgcgccattgcactccagcctgggtgacagggtgagactctgtctcaaaaaagaaaaaaagaaaagaaaagaaaaaggaaatagtcatcttccttggtaattaaaaaatgcacactttaaattgagagtccatgtttaatctatcaaactggcaaaattttaaaggccttaaatactctgtttggtagtgtccaattaaggatttgtatacactaatagtggaagtatataaaaacagcctctctggacagcaattttgcaatacagtctgtttgtgacagcatatgcttctgtcatgagaatgaggtcatacgtgatttgcagaaagttaaggatgtcagtagaacccatgccttggtccctgtgcaattcttcccagaaggttgtgttttaaaccacgaagtaccagcagctaaactcaatgcccaccccaacagctgagcatgagtagccccagggggacgcagttcatgctgcccgttccctcacattcttcctttggctagatatggccacttgttctgccacgaaagtgcttattatctgataattcactatctatatgcattttgtccttgtctccataactcagcatctcatctccaattcttctttacagccctttccatcaaacaacttttaaaagtccaatatgtaaggtaattgttactctatttattagaaatctaattaatttttaaatagcatttttatgaggcttgttattttgtgttagtgttgtggttacaacataaaataaattttgagtgatctgactcaaacatatttttccctaagtcatgttatttttagtgcgcagttttgcaggacacaatattttttagcattttatatgacatgtatatacatatatatcacattattgtagtacacctctatatgattatcaaaaacctaaaaaaattaaccagcaatttcatttacagcaatatacatataggaaaaaatcaggtacacacaaaaatgtatacataagtgtgttcattaaagagtaacttataaaactgagaaatcagaaaacataccaatgcataacacttgattgaatacttgatattccatctataaaatggaatctatgagccattaaaaataatcttttcaaagaatgcttaaagcaataaaattcatcataatacatcattaagggcacaaagaagtctgtaaaaacaaatgccacagaatatcctcaaaattctacaatataaattactgaattatgtatttcctgttttatatatgacaaatatataaatatgtatagcaaaatataaataatggttataagtaatagtagacaaaactgtggataaacattaattacctccctgcacgttcgtacattttcctaatttttctatcacaaacatatattactttgttaaataaaagaaaaatgaacattatttttcaaataaaaacataatggatgctttaagaaacaggaaggtagcaagaaaagtcggagggaaggggaaagacgtggagagaggactgggggagaatgaggccaccttaagtttgaatccccaggtctgtctcccaagaggcccagagactaacaaaaggaaatcttctgggctatggaaatcatcagttaatgcaaacactgtacctactttcctgagccagtaaagcctgattctcctgtacggctgctctctctcaccccatgccatggatgggctctctgaccctgtagatctactcacttaccaggttcctgtacccttgggtcaaagccattcaacccctttagacctatctcagctcagctgcagcccaagagccaagactgccttatccactccgttccccagaagcctggtggtccaggccaggccctgtatcagagtcactggaggagagcccccaactccattcctgctgcccaccctgccctgcaggaacaagcatttctttttaattcacagaaggacatgatgatctgggccctagtggggtatttatacaacccccaacaatgacacaggactgctggtaagagccaacagacctgaagatgtcttaaggccggatggatggctcagtcatcattcaggtgaaccatctccacctatgcccacatgggaatatgatattgggatcagacacaccctgctcccacacctatgcctgggcaccataaagcccttcccacctacccagagcaggggcaaaagaggtaaatcaacggagataaagttgatgatggttttaataagaaattaacttgagttataaagaataacataatggctcgtttccaacagcagggtagatttgattgccctgaaggaccttcccaggtgaaactactaaatggttaaataaaatattttttaaaatctattgaaatgcattactgagttggcacgaaagtcagaactctgcaaagccctaaaacaaagtgaaataagaagtctggaaggaaaatgagtgccaaagtctgctttctccctgaaggcttctgctaacctccggaaacgctgaggttcttctctgatgactatctgaggtgtaggggacaggaaaccaaagccagtcatagcccaaggctggcgatctaatgtgaaatccctgcataacgttgaggttcacagaggccagactctaaaagtgaataaaaagtaaacctgggctgggagcagtggctcacacctgtaatcccagaactttgggaggccagagcgggcagatcacctgaggtcacaagttcgagaccagtctggtcaacatggcacaacccacatctctactaaaaatacaaaagaattagccaggtgtggtgtcatgcacttgtaatcccagatattccagaggctgaggcagcagaatcgcttgaacccgggcggcagaggttggcagtgagccgagatcgcaccactgcactccagcctgggtgatagagcaagactccatctcaattaaaaaaaaaaaaaaaaaaaaaaaaaagaagtagtaaacctggatcgccacaaagaggcaacaaggaaacttaaccaatgcactctggcatgggttggagggggaaaacattgtaaacacaggccacttcttacataactttgagatccaaaattatactagttgtgagatccaaaaaacttcaggcagtgcccctgggcacttcagaagcaaataaaaatcctctctggagaaactcaacctcaaagaagtccccaagaatcctcacaaataaagtcccaaggacaataagcagcttacagcccaaaatcacaaaacataaaaacatatgaggaaataaagtatcatgcgtaaaaaccttcagagaaaaaaaagattcgcaagaactttagacattggaatttttcggtatagaatataacatacacataaatagacacaggaaaaaatggaagttaagctaaat[131 bp omitted]aaaaatccggtctctactaaaaatacaaaaaaattagccggatgtggtggcacatgcctgtaatcacagctactcaggaggctgaggcaggaaaatcgcttgaacccagaaggtggaggttgacgtgagccaagatcataccattgcactccagcctgggcaaaaaaagcgaaactctgtctcaaaaaaaaaaaattaaattcactaaacatatcagctagcagattaaacacctgtgaagagagaaatggtaaactaaaagatctgaataaatgatctaggtgcagcccatagaataaaaagatggaactatggaagagggattaaacaaaggaaatatgtcaagaaggtctaatataatgatcatcagagttccaaaagaaaataacaaagagaatgagaaagtggcaatacaggaagagacaatagctgagaattttccagaactgttgaaaaacaccaattctcagtttagggaaaacctgtgaattccaggcagaataatatttttttaaatctctatactaggtacattacagtgaaattgcaaaatatcaaagaaaaagaagaccacaattaagattacaaccaacctctcaaacactacaatggaagagagaaaacatgaagattatcttcgtgttgaaagtactgtagacgtaaaattctatatccagaaacttttctttcaataatgaggattttaaaagacattttgagacaataaaaacggataatttactagtataggatgcccactaaaggaaattctaaagcttatgcttcacacagaagagaaatggtcccaaatgaaaggtctaaaatggaaggtagaataatgagataaatattgtaaaataactggcaaagtctaagcaatgactgtacaaaacaatatatcataatgtcaaattcactggaattttaaaaataggctagaactagaatgttgaacaacagcttgtaagcttggaggaaagtagtccgaaaaaattgttctaaggcagattttgtctgccctctgcctcaaggttatatcccagggatgcactttataatgaaggtatcatttcctccagaagacaggagggtgcttgaagagttgcttaggaactgggggatcagcttcctctattcctttggctcctccctatccaatcttattgctctgttatgttattttctgccttcctatcttagccagaagcaggaaattctacttttgcaattctgcaaggcacatggcttatcccatcaagacttagtctaaagaaaggggaagggagggttcttctgtcaacactgcttgctccttcctctctgttttccagatgagctgcttagaccatgtttattgtggactacatttatgccctcccaagaggccataaggagtagccaacatactctaatatccccgaaatatctaccaatcccctgaagtgccatcctcagtaagcacacagtaacaatttaaccagctgcatagctactgataacaagggcttcccagctacaaactgaggtattcccctgtgcctcattcctcttcagctcagcaatgccaattccaagtaccaatttctgccacttttaggagtcgtttgtaggtaacgcaaattcatctcaaaagactttagtcaggaaaggaaatttactggctcatagcattgggacgtccggacctagagttgaccagggtcagagactcaaacagtgttctcaagacccgtttgctgttcaccctgcttacatctcagctccttttatagatcaccctcattctctccaactgtaaatggatatatccagcaaagttggccacaagcagcttcacttaatattgtggtttatctaaaattcagttaattgggtgggctgtattttacccggcaactcaatatgggagaaatctgattggtcctgcctgagtcacatgtctatcctttggcccaatccctgtgggcagaattgaaatagccctgtagccaggttgtacaggaagcactgagattgatagtcccaccagaatgccataggatgcaagaagagcggttcccagtgaagataaaaatctctgatgcactttgggaggctgaggtggtggatcacgaggtcaggagttcgagaccagcctggccaacatagtgaaaccccatctctactaaaaatacaaaaaattagccaggtgtggtggtgtgcacctgtaatcccagctactcgggaggctgaggcaggagaatggcttgaacccggcaggcggaggttgcagtgagctgagatcacgccattgcactccagcccaggcgacagtgtgagactctgtcaaaaaaaaaaaaaaaaaatcttcaatgaataaaaacaagagacaaccagacaagcacaactttggggtttactgaaggttggtggtagtggtggctgtgtggctgtggtattatttatcatgattttatttgcctccttctttttctgccactagattcccccagacaactgatgttcctggttaggctaagtccatccaggcatgatgaatctgataaccttggccacacgagaggtgagaaacttcattggccaacatggccagcacggaaaggagtgtttgagccctactccgtggttctcagcctcagcggcatgttagaatctcctgaggaatccttaaaaagcattgatgtgtgggtttctgatttaattggtctgggtacatcctgggcactaggaatttttaaagctcctcagatgattctaatatgcagccaaggatgacaaccactgtctaagagaatgaagcaaaaaggggggaatatcaggcttggagagcatcttcttatggcacatcgttggagtaaaagtagtttaaactgttgataatatgaagaaatgcatagaacactttggtaagtataagaaaagccccatgtaagccgggcggggtggctcacacctgtaatcctagcactttgggaggtcaacgagggcagattgcctgagctcaggagttcaagaccagcctgggcaacacggtgaagccccgtctctactaaaatataaaaaataagccgggtgtggcaccatgcacctgtagtacaggctactcgggaggctgaggcaggagaattgcaccaatgcactccggcctgggtgacagagtgagactccgtctcagaaaaaaaaaggggggagaggggggtcagggtgcagtggctcacgcctgtaattccagcactttgggaggcca[135 bp omitted]cgggaggctgaggcaggagaatggcgtgaaccccgggaggtggagcttgcagtgagatgagatcgcaccactgcactccagcctgggtgacagagcaagactccatctaaaaaaaaaaaaaaaaaaaaaaaaaccctgaaagagaagcatgtaaaattgtatatgtaatacgaccttcagaatctaaacaatttatagaaaaaataacaaaggaaacaaaaatgctaacaacagtgattctagatggtgaaataataggcttctaagtttctattttatcagatgtttctgaagttttaacttttttccatgataaatatgtattacttttataattcagaaaataaaagttaaaaaaaaaactagggggaaaatgacaaatcctttggactacattcaaggcctctatgatggggccctgcctacccctcagccaggtctcagtactctctctgcccccacacgccccaggttccagccactgcacatctccagacctcacaatgtctcatcccagtcactccagacagaatctccctttaactatagatgtagtttttgatcttccaacgaggtcatgcctcctccctgatgaagctttctcatatgcccaaatggaagccttcgtattagcccctttaccagctcagaggttcccaaaagtgatccccattgagaaataatacccttcatcctaggagcaaagacatcatcgtaaggaccctgggtgaaaagaagttattttccgtcccgcacgtactgctctgccctcgccccttccggagcagagctcgctctcagacccacgtgcacattctccagccctgcagacctcacctcgccagaggcagaaggaagtccaggcatttgcaccagttcatttagatcttagcagagcgtaaaatttactttctgggaaattataaaaacatgcaatctgcaggtctatccataataaagggtttgctctcaaggcagaagcctcttagtactgttctgtaggcagactccttccctttggtcagtgtaagctccctggagcaactcgcaatcaggggtggctttgaaaccagcagaaggagcacccagtagaggggcacactagattctggcaggaacaactcttaacccccagaaacaaggtagcttaattaaaacagaaaaaggaagaatctctacatctagattgagatgggaccagctataacttttcagggggtcatccttccaggttcctttcttccaggcaggccagcctctgcccatgtggtaccttaccctacacacttactattacacactctgtccaggtcgtttgcttcctgagagttcctcctgcttagaatggtgagagaagcactgaattcagactcacggccttcagagcctcccaatctggcctgttcaccctggctctgcccctcactcactgtgtgacaccaggtaggtgtcttcagctgtctgagcctgtttttctcatccacaaagacaagataacaatacccacctgcagggctgtggggcggagtcacagttatatacaagaagctcctagcactgtgcttggcataaagtcggtgcttaatggtcagtacctgtgattggggctgtccacaaatttttcatttcccaaggcccagctgcagcccacctcctccaggaatcatttcctgacaacccaacccaactcagacttctccctctcttggctctgatgattcttgcagtccgccccatcagcctaacacctgatttctcacttaccttgggcactgatgcttctccaggagctttccttatcaccccccaatgaacagaaaattctccattaggaagaagcacctcttcctcttctcctgcctcccccacagtgcagggagaggcacatcatagttgctccagtaggcaggcaggatatggtctgttcactgagggatacaagttcgacctttataacgaaggcaatagggagctagtgaaggttctggaggagggagatgacagaaggtgtcattcgcgtgagcactgagcagcggtgcacagtatttccagtctgtttccttcctgctttccctgcagaagccgctggcagagtgatgaatgcacagtggctgagcattattaatcaccttaaaagtaaacattcatcttggtgcagaatttttacttttctcctctaataacagattagagcacccagatattaatgggccagataatttacattttccttaagcagaaaacacaaaccatcagacccttgtggcaacaccacttcctgacacattgagagataggccaaataaactgctgtaactaaaacactcacatacgcacgctcacccgccgatacgtggcagtttgcaaacatttcgcaacaagctcaatataatttctatacacaattactcattcccttctggaggattttcctctcctccttgccttcccaattgctcggggccattaaaccacaaatccttgggtagagttcccctctgctgctttccttaaactctgaccttagccctaaataagtcagtccttaaaggaaacaactcattgagtagccagtgctaccaagaaacaaagtgggccgtggaccttcgccactcttttcacctcttctcctaccagggatcccgaaaagggagaagcatgtctgaaaagagaagccagaggagaaaaatctttgcatcttgatcctctttatgtgatcacccatgcaaagttgccatagtggattacctgaggttccagccaaagagtgaaatactgcagtaggccaagccatgaagaagagagaggacagcaacttattcctgcactgacgatgacttattgtatgatcttgaccaattcctcaatcttctctgagctgtgggttccccatctgtacaatgaatggtttggttttgatgactcaaaactctgacattttgtgatttaacttctgggcaccaacagtcacacagggcagcagcattgagtattagagctgagcagttaaaaacagcatgcataatacttaatccctggttgagctagccactgcacatgctcagtactcaggagaactacctgctgagaatgctcagtccacaggtgagcaacccactgagcatgctcagtccccctccaagtgtactacccactgggcatgctccgtgccaaggcaatcaagttccctaaggcaccagagcacatcccctctcacggagcatattcagttctaaagaaaagtgacactaggcatgcttaattacagggcagtagactgtctgccagtgaaagctgatcctctctccttgggctccccagaaataggataggcacacagtgggcccacagcaactagttgaattaaacaagtcaaataatcttagccacgctgtctctgttcacctgttgagttctacagactctcattatgacatacatggccttaagtgtttacaacaaaacaaagttcccagcaaataaacttgcaccagccaaccactccaaaacagaatatatcctcataatatgttttcaaactcatcacacctgtaagaatacagaagatttgattaatactatccaccaattttacctaattgacatttatagctctctctatctaacagcagaaatcacatttttttcaggtagcaaggaatatccattggccatatacttggctgaaaagcatgtctcaaaaatttttaaaagactgaaatcatacaagttattttattatagtggaattaaattaaaaagtaataacagatatctagaaaatcaccaaatattaggaaattaaataaaacacttttaaataactcatagatcaatgaagaaatcacagggaaattggaaagtgtttcaaactgaatgacaataaaagcaacacatatcaaaatttgcaggatatggttgaagtggagattagaagggaagttggatctttaaatgcctagattaataaagaaaaaaaggcacaaaatcaaagatctaagcatccaccttcagacacaaaaaaagaagagcaaatgaaactcagtgtaaacaggaaatggaaaacaataagaagacagaaaatcgatgatatagaaatgagatagacaattaatcttttctttgaaaagattaataaaactgacagaccctttgaagaagactagccaagaaaaaaaggagatcatctatgaaccagaaaatgggccctcaccagacactcaatctgatggcacattgatcctggactctactttgtttctagaactatgagaaattaaatttctgatgtttataagccaaaaaaagaaaaaaagaacagaaaacgcatattaccaatatgagaaattacatatggcatatcactatagatcctatatctattaaaaaacaatacaaaatattatgaacaactttaggtcaataaattgacaacttagacaaaacagacaaactccttggaaaagataaatcacaaaaatgaaatacatgaaattataaatctaaatcatcctacatctattaagtaattttaattcatagtcaacaactttcccacaaagaaaattctgagtccaagtggctttaccagtgaatttcatcaaacatataaggaagatataataaattggtattaaacaaactctgaaagtcaaagagaaggaaatattttccaactcatttaatgaagtcagaataatcctgacatcaaaaactgacaaagatattagaaaagattgttacagaccaatatttctcgtaattaaagagattttttaaacccttgttaaactactagcaaattaaacagcagtatagagaagtataatataacctgacaaagttgtgtttatcacagtaatgcaaagttgattaacatttggaaaataaaacaaatcaagttgaaaaatttttgagaaaatctgaaattcacaaaattaacagaataagggagaaaaagatcgatgtaattcacaacattgattgaataaaggagaaaaataatataattcagacaaaacattgggccaattcaat[141 bp omitted]aaaccctgtctctactaaaaatacaaaaaattagccgggtgtggtggtggacgcctgtagtcccagctactcgggaggctgaggcaggagaatggtgtgaacccaggaggcggagcttgcagtgagcctagatcgtgccactgcactccagccggggcgacagagtgagactccatctcacacacacacaaaaaaactatgagtagaattttcttaatctgatgaaggcatctattaatatctagagttaaaaatatcccacataactgtgaaacattgaatgcttttcttatgagatcaataacaatgttaatagataatatcttgaacattgtactaagctgtagatagtgtactaggacaagaaaactaagtaaaagtcataaatattggaaattgaaaagtaaagctgtattcacagacaacgtggttatattcatgcaatactctggaatcttcacaaatatattagaataattgtatttatgaatcttacaggatacaatgtcattatatttaaaaaatcaattattgctctacataatagccaccaaaaaatggaaaataaaaacttttttttttttttttgagacaggatcttgctctgtcacccaggctaaagtgcagtggcacaaacagggatcactgtagccttgacctccctggctcaggtgatcctcccacctcagtctcctgagtagttgggaccacagatgcatactgccatgctgggctaattttatttagttttattttttgtagagacggggtcgtgccatattgcccaggctggtgtcaaactcctgggctcaagcaatcctcctgccttggcctcccaaagtgctaggattacaggcacaagcaataaaatgtttttaaattgtcatttgcaataaaattaataaactcaaatacctaggtatgattctaattaataaggagcaaaagcactgtactgaaaactacaaaacagttgctgagagaaatttaaaagacttttaaaatggaaatatatcatgtttgtggattaaacaacttgatattgttaagatgtcatttgcccccaaagtgatctatcaatcacaatcccaaattccaagaggagtttttgaattgacaagttggttctaaaatatatatggaaatgcaaagtacctagagtagccaaaacaaaaaagacaaagttggaagacttaaactaatatcaaatctttctataaagtaacagcaatgaaatcagtatgattttggtgtaagaataggtgaagagagcagaatacaaggtccaaaaatagacccacacacagtcaattaatttttagccaagccaattcaataaaggagaggaaaggcttgttacaatgtgtcagaataactgcctagttctatttaaaaacaaagaatctcaactcctacctcactccatatgcaaaaatgtattagaagatcataaagctaaacatagtgctagatccagaaatcttccagagaaaacataaaataatatctctgagacttgggatacacaaagacttcttagaacacagaagccagtcatcataaaagaaaaaattaacaaatggaattaatgaaaatttaaatttctgctcatcagactatgccattaataaaatgaacaaggaggccggccacacactgagaaaaatatcacaatatgtgtatctctaacaaaggactcatattccaaatatatgaggaattcctactaatcaacaaaaacacaagtagcacaactttaaaaatgggcaaaagatttgaaaagacattccaaaaaagaagatatatgaatggtcattaagacatgaaaaatgctcagtatcaattttcttcaggaaatgcgaattaaaatcacaatgagatatctttcatacccactacaatgtgttcttttttggcaagtggggtatttattaaagacctacatttgtgttaagaggggaaagaagcaggattgggcagaaagaagctggaaggcagtgcggtcacagtctagcctgggtatatgtggctgttcagacatgtctcatttggggcccaaatggccaggcttcttattcctccagtggatccatgagaattatagtgggtccacttctgcttccactgcttgatttctggacccatgtatccttttaattgtcgtacaagacggcattccatccttgtagagggccacctccaagctgacacctcaaccgcaccttgggtatgccatctaccaaaactctatcaggctggaagctggaatgtactttttgaatgatggagaatgagcacaaggaatctttttggagagatgaaaatattctaaaagtagatggtggtgatggttgcacaactctataaatgtacgaaaaatcatcgaactatgccttcacaatggcggaaatgtatatgtaaattactcctcaatatgttcatacattgctactgaaggtataaaccatatatcacaattgaaagatacaagcatgtagtaaaattgtaaagaaaagctagagaacgataaacataaaattcaggagagtagttacctacgagggggacagaggagaatgggaagtgataatggcaaagaagaaatgttgaaggtattggtaatctttttccctatattaggtggtggtataaaagtgttcattgtatcaatatttcttataccttctatctagtttataaatattaataaagattattttgtttctactcacatacataaaacaacttatagttaataaaaacaacttaaaataaattggcggggtgcattggctccagcctataatcccagcactttgggaggctgaggcaggcagatcacttgaggtcaggggttcgagaccagtctggccaacatgatgaaaccccgtctctactaaaattcaaaagttagcggggtgtggtagcaggcacctgtaatcccagctactcagcaggctgaggcaggagaaccgcttgaacccaggaggtggaggttgaagtgagccaagatcatgccactgcactccagcctgggtgacaaagcgagattccatctcaaaaaaagaaaaataaataaaataaaataaattgtaaaagagataaagagccgggcgcagtcgctaacacttgtaattccagcactttgagagaccgagggtggtgaatcacaaggtcaggagttcaagaccagcctgaccaacatggtgaaactccgtctctactaaaaatacaaaaattagccgggcatggtggcggaagcctgtaatcccagcacttggggaggctgaggtgggcagatcatttgaggtcaggaatttgagatcagcctggccaaatggtgaaacctcgtctctactaaaaaatacaaaaattagctgggcatggtggcgcatgcctgtagtcccagctattttggaggctgaggtgggagaatctcttgaacctgggatgcggaggttgcagtgagccaagatagtgccactgcactccagcctgggcgacacagcaagaccctatctcaaaaagaaaggaaaaagaagaaagaagaagaagaagaagaagaagagaaagaggaagaggaagaagaagaggaggaggcggagaatggggaggaggaggaggagaagaagcagcaggagggaggcgggaggatggaagagggagaagggagaaggaagaaggaagaagaaggaagaagaatactaggttgagtggaggttttgccctcttcactttgggtagacaagagagcaagggagtcatagcactgatcctcccagccccagcccagtgccattgagatactaataccttaacacttccataaagatatgcacacatctgccttagagttcattgtctggggttttcagagaaggaaagtgagaaagcttaggtgcaggagcaggaagagtgttgaatggtgatagcccttcaatcagtggcaataccttcagcagggactcctgggcacagtatctgcacacctggagaaatagtaagttccagggcaggctaagataccatcacaaatagacccacaatatgttaatgactcaaacacaatagatgttcattcctgcctcaaatacctagtccagagaaggtggtcctccttcgtgcagcgttttcagtcccagactccttttatcttctggcttctctattctctaaggccttattgtcatctgcttccagtcagagagaaaaaaaagaaggaggcaggagggacatatctgctttttttaacgttttagcccagcaaccttagggcagacaaagatgtcttagaacaggacacgacgaaaacacaccatcaaagaaaaaaactgacacgccaattaattggactgcatcgaaatgaaatatttctccttttcaaaacacaacatgaacaaaatgaaaagccaaaccacaaagaaaacatttattgcggcattattcacaatagcaaagacttggaaccaacccaaatgtccaacaatgatagactggattaagaaaatgtggcacatatacaccatggaatactatgcagccataaaaaatgatgagttcatgtcctttgtagggacatggatgaaattggaaatcatcattctcagtaaactatcgcaagaacaaaaaaccaaacaccgcatattctcactcataggtgggaattgaacaatgagatcacatggacacaggaaggggaatatcacactctggggactgtggtggggtggggggagggaggagggatagcattgggagatatacctaatgctagatgacgagttagtgggtgcagcgcaccagcatggcacatgtatacatatgtaactaacctgcacaatgtgcacatgtaccctaaaacttaaagtataattaaaaaaaaaaaaagttaaaaatcatctaatatatgtggcatatatgaagatgttacaaagtttctgaagatgtattttgtaaaaatccaataaatttgaactcctgaataacaaaaaaaataaataaataaaataaaataaaataaaattataaaaaaaaaagaaaacatttttgtaattcacataccaaacaaaggacttgcatccacagtatataaagaacccctagaattcaataagacccccccccaaattcagtggcaaaagattttaagacactcacaaaaggagatgtgcatgaaaggatgtttgacatcatcagtcatcaaggaaatgcaaattaaaaccacaaagaggccaggcatggtggcttatgcctgtaatcccagcactttgggaggctgaggtgagcagatcgcctgaggtcgggagttcaagaccagcctggccaacatggcaagaccccatctctactaaaaatacaaaaattagctggacgtggtggcgggtgcctgtaatcccagcctaaaaaggtaaaaaccacagatatacacaacaacatgaatgcattttaaaacatgtgaagcgaaagtagccagcccagaccacttcatgttgtatgattttatgtatatgaaatccgtgaatgtgcaaatctaatctacgataacatacagtggatcaggcagtcacctgtgggtgggagggatttattacagtgaagcaagagaaagccctttggggtcacggaaatgttcaataggttgattgtgctagtagtggtattcatcaagctggtattggggatatacaagttgtacattttcaaagggtgcttttcattgtatgtaaattctgtgttgataacattgattttttttaagggaaaggggaagtcttagcctagaaagtgcacataacataacttttactcacattacggtggttagaacaaaccatcataagttcactgcaacttcaagggaggctgaggagtgtagtccagctgtgtggccaggaagaagaggaaaaacaggtttggcaaatagcagcagcatctgtcacacccaactgtctgctgcccagagaatctactggagagcccttccaaggcagatacagtgaggccgccccaaggtttacagcaaggcaggagatgaggctgggacacagggcagggctgagcacagagaaaaggaggaggctgctggaggaggaagcattcccaaaagccatttccagaggaataaagcaagaggaaatggtgtccacaaaagcttggaacaagaaagcagatgtttggagactgggttgggaagtcctgcatggctggacacagaaaagttggaaagagtagtgggtgatggagattctgggctctaagatcaagggcgaagcagtggggctgtctcttgtgaaccctcagaaccctgggagggttggagggaagctccagctctgacagcccctacactgtttgcagcacttagttgcttaccttcccatgcagtcccagcacaggggagtgagggatgggtcgttgcctgaggtgcgcaccccaagactggggaagccccctccacccggagaaggtgggagaagtttcgagctgtgactcaggctgcactccaggaaagaggcggatggaggagccaacgtcacaggcacgaagtcgtgtgtggctggagcccactcacaaaccccactcccgtctgagtcactgcacagaaaaggcacctgttgctcagcaacggaggggaggtcccggcaggtcccagctcccggcttcagactccggcctggttaacccttcacttcccaagtagggggaatctgaccccagaaactctatgtcaaagatctagacttacctggttttggctttacctgccagccagcctattccgaaaaggaacacctgccagtggaggatacagtatctactgcatcccactccccactgtcccactgagggaagaaagcccccaaaggaccaaggccttgcccaaggccacacagttaacaagtggcagaaaagagacaggaaggcctccaggcttcatccataggtattaaagatcttttgccaggcgcggtggctcatgcttgtaatcccagcactttgggaggccaaggcgggtggatcacctgaggtcaggagttcgagaccagcctgactaacatggtgaaatcctgtccctactaaaaatacaaaaattagccaggcgtggtggcaggcgcctgtaatcccagctactcgggaggctgaggcagcagaattgcttacacctgggaggtggaggttgcagtgagccgagatcgtgccactgcactccagcctgggcactccagcctgggcgacagagcgaaactctctctccaaaaataaataaataaataaataataaaaaagatctttttaagtatcaggcatgataggggaagagctggtgagggcccataaaatatgtagggcctgaaaaagaacaattggttccaaaatacgaaaagcaaactgcaaaatcatatttagtaaaatgttcaattaaagattacaaaagaacacaatgaggccaggcacggtggctcacacctgtaatcccagcactttgggaggctgaggtgggcagatcacctgaggtcagcagttcgagaccagcatggccaagatggtgaaatcccgtttctactaaaaatacaaaaattagctggacgtgatggtgcatgcctgtaatctcagctacttgggaggctgaggcaggagaatcacttgaacccaggaggcagaggctgcagtgagccaagatcacgcctttgcactccagcctgggcaacagagtgagactctgtctggaaaacaaacacacaaacaaaaaacagtacgacaagttggcttcctgaatggtgacatgtagaatacgtagaacacgtccttacatttgaaaaccatgttctagaattgctttcgtcaccttgcagaattcctaagggtgcctgagaaaagctgaccaacactaacttagactagttactgtgaccaaatcatttcaaaagcaaagcaaaattatcaaacatcttcaattttttttttttttttttctgagacggagtttcgctctgtcactcaggctggagtgcaatggcgcaatatcggctcactgcaacctccgcctcccgggttcaagcgattctcctgcctcagcctcctgagtatctgggattggaggtgcgcaccaccacgcctggctaattttttctatttttagtagagacggggtttcaccatgttagtcaggatggtttcgatctcctggcctcaggtgatcagcccgcctcagcctcccaaactgctgggatttcaggcgtgagccaccgcgcccggccacatcttcaatttatttacagaaagaaaaaaaaaaatccacatttcatgtgaggtatgtgctacctatgatgggagaagcttccggaggaaggaggtgaaagcccgatggagcctggaaatggatctgcctgtgcctttttctcgagtcagggctttgcagctggagccccagcccctacctgaagctgtaggtgggggacaaaaggacccagctgggggatgccacgcccttcatgacctccagacagtggggcacgctgagaaaatgcctgcctcagagggaaggaagtggccccggaggattttttccctcctgaataggaaagcttctctcctggagacagattccacagctaactgagctgcagcctggcaaccgcaccttcccaggcatgctgagcgtgtgcgtggcagctccccatgccctgctgaaatgcccgatcctattagtgataaggtgccggggagaagttttatttcatgttccaagcaggttatgctgatgcaaacaagataaaggtttcgtgctgcgttcttagctgtaccaggagtcctggggatggctttccaccagtaaatggtagtacattatttgctctctggggcaataagaggtgaacagtcctgtagtctctccttgggggatctaccctaaacccaagtaccacctcagtcccaggcagaggatctgctgtagggactccttggccccctgccctcttctccctctcccactacagctgatccccgccactcacactatgtggatgcctgggacaccaacagagctggagtagccaaagtattttttcaatgaaccttaaagaaccttacaacagtgtaactccatttactcgttccctgtcatttgtgttgttctggtcatatatttcctattttcatacattatagaccttataatacaatgctattctttttccttgaagtagtcattatcttccaaaggaatcaaaagaagaaaaaaaaacattgtttttgatatttacctacattttgccattgctaatgttctttattctttctcttatatctgagtttcccctggtgccatttccctttatcttgaagaactgcctctagcattttgtgttgcatgtctgctcagcttttgtttatctgaaaatgtcttgatattgccttcgtttttgatatgaaaagagtgtttttcacagaatattgaattttgagttggctgctttttttctttcagtgtgttaaaggtgccattccattgtcttacgatctccattgtttttgatggcaagtcagctatcatttgtatcattgttctctgcatgtaaagtatttttctctctgctttcacgtttttctctttctttgcttttcagtagtttgatgatgatgtgcctaagtacagttttctttgtatgtattcagccatggggttggctgagtttcttgaatctgtaagtttatgtcttcatgaaatttgggaaaaattaggatgctaccatagcatccatatattttctctgtccaactctctttctcttttttctgggactctaactaaacatatgataagccacttgatattgtctcacaaattgctaagaccatgttcaattttatttcaattaacttttttctctacagattggatgatttgatgtgtcttccatttcactcaccctttcttttgctatctttagtgagatattaaacccattagtaaatttttcattttagatattttactcttcaattctggaattttctttgggcttgcttttatcttcttttctccatctgctcatcattatgatcaagtccatatgtattttattagcttgtttataaagattttgtcaactaattccaacatgtgggtcattttgagatctgttcctatcaacttttttcttttgccaataatcacatttttctgttacttcgtatctacccatttttaattgtatactgattattgtggataatacattgtagatagactttggattctgtatatttttccatgatgagtgctgatttttgttgtaatatgaagttaaattactagataatcaccttgaactcttagaggcttggttttgtattattagagcaggtctgtttcagttttgcccttcatctgagagcaaatccctagtcctgggacacaatcttcactcctccagtgtagccctcctgagaccctaatggaaggcccaagggcccatgaagcctctctcagatggcagagccacgatggctttgctcacatgtctggcagttggtcaggctgtcagccagggctcctcagttaacctcctgtagactagaccagcttccttgcatggtggtctcaagacagtattccaagagggtgaagacagaagcttcaaggcatcttaaggcctaaccttgaaaatcatacaatatcccttgtgatggttaattttatgtgtcaacttgactgggctacaggatgcccagacattttgaccaaacattattccgggtgtgtttgtgagggtatttttggatgatatcaacatttggattgatagactgaataaagcagattgctctctccaatgtggatgggctcataaaatcagttgaaggactgaatagaacaaaaagtgtgaccctcccacaagtaagagggaatacctcctgcctgactacctttgagctgagacattgcctttttcctgtcttcagacttgaacagaaacatgacagactcgtccttcacctcaggcctttggatacctgcgtctccagcttgccaactgtgagtcttgggacttgtcagtctctgtaattgcataaaccaactatatacatacacacacacacacacacacacacacatataaatatatgtatgtatgtatgtatgtatatagagaatatatataattaattatattacccaattaatattaattatatatatcacatacacacatatacagatactccttaacttacaatgaagctacatcctgataaactcattgtaagtagaaaatatcatacccctataaacccattgcaatgtcaaaaaattgaaagtcaagccatcattaagtccagatgctccttgactcacaatggggttatatcccgtcataaagtcaaaccatcataaatagaataccatccctctgtgtctgtgtatgtctatgtgtgtgtgtctgtgtgtgtgtgtccatcataaataagggaacatcagcgtgtgtgtgtgtctgtctgtcataaataggggaccatctgcgtgtgtgtgtgtccatcataaataggggactatccgtgtgtgtgtgtgtgtgtgtgtgtgtgtgtgtgtgtgtgtgtagtcttctgttggttctgtttctctggagaatcctgactaatgcatcccttctgccataatctgttattcactagtcacaaaatagactttatctctgaatgaaaggagttaaaaagtcacattgcaaagggatgtgcatacagggcaaacaggattttgtggccatcaaacaatctaccatagcaccctgatacagtttggatatgtgcccccgcccaaatctcatgttgaattgtaatccccagtattggaggtggggcttggtggaaggtaattgcatcacgggagtggagcaaagatggtcctcttgctctctctctctcttgctcctgctctggtcatgtgatatgcctgctccctcttcacactctggcatgatggtaagtttcctgaggcctctccagaagctgagcagataccagcatcatgcttcctgtacagcctgcagagccatgaacaagcctctttataaattacccactctcagttctttctttctttctttgtttccttttttttttttttttttttttttgagatggagtttcactctgtcacccaggctggagtgcacggtgcgatctcagctcactgcaacctccgtctccccagattcaagcgattctcctgcctcagcttcccgagtagctgggattacaggcacctgctactgcccctggctaatttttgcattattattagagacggggtttcacaatcttggccaggctggtcttgaactcctgacctcatgatccacccgcctcagcctcccaaagtgctgtgattacactcggcctctcaggtatttctttacagcaatgcaagaatgaatgaatacataccctttattatccttaaaatgaaaacatggaaaatagagctaacctaaatgtaaatgcttaaaaacataaaagcattcactaaccataatataaaagaggtatggaaggtaaatcatttataataaaacaatatgtatttcaatatgtaaatgcttcggcataatcgcactagaagacatcatgaagtaatcagcctcttatatttatatgcagagtgacacacacagcgtgacacaggaatgttatcctggtgactcatattatgaacatcattatcttcagtaatgatctccaaaatggtgaagagctattggtaatgttcagaacaaaacaaaatataaaattcccttgatttataccacagctgtattcctccactattcagtatgggttaaaaacggtgccaaaaagttcttatgctctagtttcagataagcatgaacaagaatacaccaacaagaatatctggctggacatttgaaatccagcaggacaagggataatttgttgagaacatttcaggaaaccaggcaccccaccatctttggtttaaccaaagccacactctaaagtttgagttgttccctagggggccataccaccagttgagaatcatcagatggggggctgttataacagagatatagacctatgtagatatataatgcatgatcacttccccccagtgcatcagcagagaaaaagcaccacccaagagaaccaccagtgaggttccagagagaaaaggaagtacaacagaggaggcgctcaggagaagactaatgaaagaagcagatagagttcccagcagacacacgacgtgaatggcccagtgtttctgactcacatcagaataacgcaagactcagtcttatggcccctcagggagagggcaggccaggcaacccaccctaccgagggcttgcagatccagtccttgagggcatgaggataggaagctggcagttccctgcccaactccaagattttggagctaacttgggggaaattgcttctgttggactttaaagatgaacaaatttagtgcctttgtggagagattctgggccaaggaataccacaagatttagtattttaaagctgcacccgccaccgcgagttttacatgaggaaggagggaaggtcacagctcgatgtgatggctgtgcatgacgtgatcgggtctccagaggcaaagggattcagccgagggcctgtctgtgtgtgcatgtggtatgtgcagttagagtgtgatctatgggttgccgagccatttctgttaattaaacacttcaatataattttgaggtaagagcccttggcctgtatttcagacagtccctggaggactggggaagtgggagaatatgccatctggcaaagcaccatgaaattgaatcacctgggggaattcaaagaaaactgcactaaccatggagggatagatagatggacaaatcaacccacaggctctctattcactttatcaaagatcaagggtaggagtaggtttccttttcccccaccaatggccaacccgcccatccagcctccggccacattgggatcccccagaagccaccaggccctgctccctgcagccgcaaagcacagacaatggcagccttccctcttgtgccccctgctcaccccggagccaggctcctctgacttcccctccaaatccaaccctcttattcctcagatcgtgcgtacgtagggccacgaaagtgcacgttaactcaaggccaggcatctttggaaggaaatcaatacataattatgtgttctgtctgccacatggcccagagccaggctgattgggaattagagaaagtgaaaacagagtggtcaaggccagcccagcatctagatatgccctgtcagggtggaagaagcggaggccgaggacccaccaccaggcctccgtgtggatctcacagccttttccacttgaagcatcgcatcctgggaccagttcaagcaggcagactcaggggcactggctcctttgcttttctgattccttgctgcatccacagggggctggactctgcagcagcctcctcacctgcctccctgtctcccttctatccccctctaatctacccagcttgagcaccagcaacccagatgatcttcctaaggtgcaaatacaaccacgtcatttgtctgcataaaggcattctcaggtagcagcatggggttgacagcatctaatatgaagttagaaagacccaggtttgagtattgcctgaggcactgaaagacgctgatcaagccattgtatccctctgtaacatggaggaaataagagtatcaactttacagagttgcttgtgaggattctagaaaatgatatgggccaaacctggcacaccgtaggcaccatgtaagtaatagccatcatcattatcatcatcatcaacatcattatcatcatcatcaacatcattatcatcatcatcaacatcattatcatcatcttttttttatggctttctccctggagataatgtcttcgtcctctccaggcctccttccacacattttcattacaacacttaggatttggaagcttccgtcctctttcctccacttgtaggaggatccaggcttcacaggcagaggacctgggggcaagtcatgtcccagtggatgaagccatgttcttctggggcttccctgtgatgatggcatatgcctgtgagatggaggagcctcagctgcagctggcccacaactcaggccgtgcaaaaacctgagctcagtccggggtttgcctttggacctggacctttgtcttgggccagggccagagctcattccggaaatagggtcagaactcagcccacccctaggatcagccctcagcctatagccagaatctgggctcacactggggccacagtggagactcagttcaagggcagacagcagagtttcttgatgtgaagtttaaagatttccatgaacataacccatggctgaagcattgtgggcatccagctctcagcatgctgtggctgaaatgcatcattccccttcatgatgtgaaggcaccttcctgcccacatgcaacatgaatgtagacatttttaagaacaaaaagactgacgttagcaatttgtcttctgcaaacagcagatctgccaaaaccactctgccacttgatgccaaaaagacacccgctacagccatatctttgtgtcttgtgataccagacaggcagaaaaaaaagcaaaaataaatgtcccttgaatatttccaaagatccaggtttgggccctctgtctctagcacccctaccctggccagaaggggagaccctgggacagaggaccacagtgggtgtttctcatggctgtggcacagatactgggaggcaggcaccgagagcagaaggagtgagtcaagcatggatcagagagcagaggagagcagcccaaggatccaggggttggaatgggcctggagaggaggtggcaggaagggagtcagcagcggcggccagggcttctgcttcagtggcaaccagtgccccatgcactttgccagggacaagaaccaggacagaaggagcagtggacagagcccggagggaagctggtcccctcttcctccgggcaagggatgtgcaggggctgcatcagccctccccactccatggctccagatgccccttcctccctccacatcccacatcctctcctctgtggggaaagcagccctgcctagaggcagccttctccacttctctctccaagccttgatttctcctgcactctgtagactcgagtctctgtttcacccccaattcttttactgagatggttccagaaggcaaattcctccacagcattaaaaaataatttatagaaataatgttcctttaataaaagccacatagagttatacaatttttatagtgcacgaccgaacaagaaaggtctgaactcttgtataaaaatgaatctgtcccgctcccatgctcagaatgataccacctccttgggctaacataatatattggcttggaaagtttaactttcagtgtcattgggccgagctggccactcattctgctccaaagagctcctccaaagacaaactcttccagtgtggctcataaatatgagggcaggaaaaacaaacttgcttctgcttctctctctctctctctctctctctctgtctatatatatatatatatatatatatatatatatatatatatgtataatataggcagttagtggctaaattgtattgtaattgattgcaaaattgcttttttaatgagatttagacacgaggaaatagcttttttttctgtaacatacccaaagtgaacttggtcactttgacaacaaattgtctctgtggctttttcctagtcatgtataatttggatattagtcatgtataaattggatattagagaagaggattatgggctgccttggaaagagacagctcaagccagcagttcatccccactcccagcagggtcggtgacctggcagccccttcttcccagaatgctccagaacactt[131 bp omitted]ctacaacctctgcctcctgagttcaagcaattctcctgccttagcctcctgagtagctgggattacaggcacgcgccatcatacctggctaatttttgtatttttagtagagacagggtttcaccaagttggtcaggctggtttcaaactcctgacctagtaatccacccgcctaggcctcccaaagtgctgggatcacaggcgtgagccaccgcgcccggcccagagcaccaccttctgcagtccaggatgctcctccatctcagtccaccttactatgtgcctctaccctggagggaaataagagatccccttagaacatgtgccagagggacccactcagctggcaggacccagtcagaacctcaagcgcttcagaatctagtaagggaagtctgcatatcttgttgctgaagacacaggtaccgtttgtgccctcctagatccccttcaaagccagtgctgtgaatattggatgctaatggctcacagcacccccttctccagagcagcctgtttttgtaaataaagttttattggaacacagccacgcccgttcatttaattgtctgtgactgagttcgcagtacaatggtagagtcgagtcattgcaacagaaaccatatggcccacaaagcataacatatacactacctggcccttaacagaagaagtttgctctagagaatgagcttctgccaatgcacctgcgcgtaaaagtcatgctgcccacagcccactgcatgactaactcagggatctgaaaagcccacctgcttgtctcaaggtgagaccagctgtgcactgtggttcacactccagagcgccccacagggtcaggctgaggttagagccagctgagagcccctgtctgcctggctcctgcccctgccctctctcatcatccttgtttcccttcttctctgaggacttccacgataaattacatgccccagaacgcccgtcctgggttgtttctaaggatcctgacttgtaaaaactaagtcactagaacttttttttccccacaacctcttgcatagaaacccaggttttcaaacagatggaacggagtggtggggaaccccggttactcagtgtcgccttcctcttcagcagcccctggaacgcctcctcagaattccaagagcctcaaaacaccattggtaaactgttgcctggggtgtgtgctctcccaccctggctgggaaacttccctgacttcctattcctagagatcactctctcacccagaacccgaagcatggcctggcccccaggcacttgtccccatctgctggctctcatggtggcttgtgcctggccttcctttttttttttttttttttttttttaagatggagactcgctctgtcacccaggctgcagtgcagccctgcgatccggctcactgcaacctccgcctcccaggttcaagcgattctcctgcctcagtctcccgagtaactgggattacaggcatgcaccaccacgctcagctaattttttgtatttttggtagagacagggtttcaccgtattagtcaggatggtcttgatgtcctgacctcatgatccacccacctcggcctcccaaagtgctaggattacaggcatgagccaccatgcctggcccctgcctggccttctctctctgccacaatgtgaactcctctgtgacccattcatcttcttctcacccagaaaactcaccattcattcattcaatgtaacagttctggttggcacaccacaacatgccctatgcttggcactgggactccagagatgaataagtcaggattcctaccccaacgagttcacagggtgagagagaggaggaagaaacaggcacgccaatggacaaggaggccaggcagtcagaaagtcagaagagcctttgcagaagaaggaacatttgtactgggctttgaaggatgagtaggagttcacagggagtgaagccaaggagctcagcactctctgcttgcatcgggtgttcttcaatgcttgtggggtgaatccacagtgaggtgaccatggtgggaccaggccacagccagagggagcctggccaagtctgggactgagtcttcattccttgctcacctctctgggtgacttcgggtaagttcagaggggccaggacccaaccacagggccagatacaccttcccgggaagtgttgcttcatccgagacttaaaggacaaggacacataaagcaaaaaaagaggcaggaaatggacattctaagaggaaagaacagtcggtatcaagtcctgcagggaggagtggagagcaagagttgtgacagtcacaagcaaccgaggggattcacacgagggtggagcagagtgagaagggggatgtgggagagaagggcggagtccctgggtccctgagccagaggaggaagctccatcatctctgttgggaaggtctttaaagcggacgtaacatgagcaggtgtgcatctagaaatgacattgctctggtttctagaaagagaagagatttagggaagccattgatggcctccagtgagaacaggcagaaaggtttgcagcaagtccagacaggaagcaatgacagccgggacaaggtggacagaaatgggcagatccaagagcaatttgggaggtaaaatggatgggacaggagctaaaatggacaggatgcggttggatatggcagatgaaaaggaaggggtcagggtgtatcttccttgggtctctggaggatcactagcatcgctgactaaggcagagtcagtggtgcctcccagggcctcagttttcccttctgtacaccgagaggctggcgcaatgctctcccagggcccctccggcacaggcatcctgatgagcaattcatcacggtgccaagcacttcagaggcggaggtcacgtaatcctcacagcaatcccagaagtcagatctgttattatgaccatttcggaggactcgggctcagaaaaatgaagaaatttgcccaagatcccccagctagtaagtgggaggctgaaacctgggtcatgtgaatccagagtacatgtcctcaccctcctcgccacagcatcctgcgttctgttccagatctcaggagatgctgctgttcacctttcttgtccctgggttgctatgtaacccttgtttctccatctgcccttatcctttcaaggactctccccacaacagttgaggcaagtaaagtttgtatctgccacttgaagtccctgacgttcctgttccaatgaccttagggaatcagctctgcagagattctaacgtagactcatcaagaaatctagaaaccaccaccagcaccaattcaacagtacagagcacctgcatatctccatactggcttgtgtatcagttagggtgataccagtgactgctgaataaggatgcacactttaaggttttagtgcagtagaagattatctctcattcagcatgggtgttcctaggtggtggacaacttctctccacataaagattcagagatccaggttccttccatacaatgtctccaccatcctctaggaaagggcttggtaactttttttttttttttttttgagatggagtctcgctctgttgcccagactggaatacagtggcgtgatctcagctcgctgcaagctccgcctccggggttcacaccattctcctgcctcagcctccggagtagctgggattataggcgcccgccaccacgcccggctaattttttgtatttttactagagacagggtttcaccatgttagccaggatggtctctatctcctgacctcatgatccacccgccttggcctcccaaagtgctaggattacaggcgtgagccaccgtgcccagactttttttttttttttttttttgaaatggagtttcgttcttgttgcccaggctggagtgtaatggtgcagtcttggctccctgcaacctcctcctcctgggttcaagcaattctcctgcctcagcctcccaagtagctgggattacaggcatgcgccaccacacccagctaaatagttttgtatttttagtagacccagggtttcaccatatca[135 bp omitted]aggctttgtgggccagatcacatctgtcacaactactcaactctgctcttgcagggccaaagcagccagattatacgttaaacgaatgggcgtggcaatgtttcaataaaactttatttataaaaaaacaagcaataaatagacacagctctatgttccaagaaaacttttttacaaaagcaagcagcaaacccaatttggcccatgggctgtcttttgcttctgccaactggcaaaggagatcaggagggggtggaagacacccacttaaactccttcacccagagtgtcacacagcacttccacatatgtttgcatgttgctatctagatgagaagcgtagtctctgactgggcatcactttctagcagcagacctacgctgtgggcggacaacgtggatctttggggatcagatggccagctacctctgggaatttaggtccaactaacacctagtgagcgtctcctgtgtgtggcagcttctgtgctctttctgggcacacaggggttcaaaagatgctccagccctagggggatcagagtctagtttaaattgaaaaagagaaagatcttattcctaagatttcagctctttttctgaggcttttacctttcaaacaagtacccaaaaataccaggctgattacaggtggctcatatctataatcaggtgtaggaggatcacttgaggccaggagttgacgaccagtctgggcaatgcagcaagacctcacccctacccctgtcaccatacaaaaaaattaaaaattagccgagcatgatggcatgtaactgtagtcccagctacttgggaggctgaggtgggaggatctcctgagtccaatagtttgaggctgcagtaagctatgattgggccacttgtactccagcctcagtgacagagcaagaccccatctcttaaaaaaaaaagaagaggcagagaactggtagagacttcttcacagggcaggggccattctgttttatataccattgaatcctagagctcagtatagggccaggcatacagaggggtcctggtatttgctgaatgaatgaatgaatgaaattgtgactcatctacaaagctagaaccttgggggttagtgcaggacactttccatagttgttgggtttagaatctaaaccagggaatctgtcttagatctgtgcaatgtcaaaatatcaaaggaggattatttgtatctaaacagaagagcaaaaacttagattcatcatgtagacatttggtctgtaagaggaattctggtccagaagacctaactctaaggatctgtgacagtaatagccacagcataatattatacaacttttttttttttttgagacggaatctcactctattgtccaggctagagtgcagtgacgtgatctcagctcactgcaacctccgcctcccgggttcaagcaattctcctgcctcaacctcccaaatagatgggattacaggtgtctgccaccacgcccagctaatttttttttttttttgtatttttagtagagacaggg[132 bp omitted]tctaaggtgaacctatacccatgtgctgatgtgaaacctcatgcacgaccttaggtggacaagataagctccactcttccccttttacagaagagaatactgaagccctgagagatgcagtggatccctcaaggaaactcaactagaaggtccttgaaccaggcctagaggccacgactgatcttgaatcaaggaggtcctttcccttctcctcgcctgtagctctggcttgagaacaaagtagccactaagtatgggtttctagaatgtagctcatgtttaaaacttttttttttctttttgagacggagtctccctctgtcgcccaggctggagtgcagtggcacgatctcggctcactgcaacctccgcctccggggttcacgccattctcctgcctcagcctcctgaatagctgggactacaggcaccggccac[133 bp omitted]ccgtgcccagccctttttttctttttctttttctttttctttttttttttttttttttttttttgagatggagtcttgctctatcccccaggctggagtgcagtggcgtgatctcggctcactgcaagctccgcctcccggtttcacgccattctcctgcctcagcctcctgagtagctgggactggaggcgcccgccaccacgcccgggtaattttttgtatttttggtagagacagggtttcaccatgttagccaggatggtctcgatcgtgtttaaaatttttataccaactggcatctcccctgaaaagcattggtccaaggcatgtgtgtatttcaaataaaaggagttccaattttgtaaactttatgaaatgaaacaccctgaagcatgtctcacaaatgagattgaatttacacaaaatcaagagacggggctgggagacattctcttatactctgacctctggcaagccacttcctcactgaggagtttattctcagctgttacaagggggtgggagccgatgctctctggagtctttctcaactcaaagaaaaatgctataatcaattatctctgggcattcggccaacattttcacattctctcaataacccattctgtaggcttcaagggaaggcaaaggtatttgcggttcactcaaaggaggctggggtatttccctccaggccatgcaggtgacctctggacctgactgtccagccagatagagctgggggcatgggggagttgggttggttgctgctgagttttgcagctaggttggttgctgtgagccagaacatggtgtagacgcctcagacccacattcacaagctgctattcccaaactatcactttgcaaggactctgaccctggacaatatccctttctcttcatcttcagaaagtggtaattattgtgattatgagctattaatgtaatcataactagcaggcaatggagtggcccaggcagtaccttgggcctctgccgtcacgcagggagggaagctgggtagccagttccccacgagcgcagagagctgcacctctagctcacccagaatctgccccagcaggtagtgcttcgagtacgtcctctgcagagccacctggctaagaggggagaaaagaaatccggccggaagtcaggctggtgggaatttccaaacgagagcccatgtgttgggaaggacgcgatggacagaacttctcaggggtttgttctgaatagtactgagtggcatgccaaagtcaagatttttatttcttatttttcaaaagccgcattgatgggaacaagctcacaatacaaacagtggtgattgcaatcacttgccgttcccatggcaacagacaagattaaaagagcaaacaacgaagctggaactctcttcagactaaatgctcccgattttaattgccaggcagcacgctgacacatggagtccccggctcgcggtttaacaggatccaaacctctcctcagtttctaactggaggccatctgggctgaccacccacaccctcactcctcccacccagagcatgaagcacaagaaagcatcaggttgctccttgaatacctccagcgacggggagctcattccagccggctggacgtgagggctcagtaatggggcagtcttagcattcagaggagaaaaccatgagggcgtgggttcaggctgctaaaataagaaccaaaaggcaaaggttgataatagcattaattttaatcaaatccatcatttatggaggcatggttctcagtgttctacccttgaccacaggaagacagcaccgatgacttaccttcagcagagaattcctatgtgtcacacacacagcactagtcaatctttatgtatgacctcacctaaccctctcaacagcctgcagcaaacgttattataattccgattttgcagatgagggggctgcagcttggagagatcaaagccaaggtcacataaccagcggtggcagaaccacaacagaaactcagacccatttgacatcagagcccaggcttttgctaccattttgcccctggaggaaggaatccgctggatttggagacagctgcctggcaggggcaggcagtggtgagaaggtgatgtctcggggacccccggtggcattgccaagctgttctctctgagcctcccctaaaggaaactccagtcttagggctgcaagctcagctcccctctctgcctgtggcatctgcaggatggcattgttactattgccttcttgagatttttcttgtttccaaggctccagctttgccagcttgatcttccttctccccctgagccatgagttccctcttctcacagctgccaggcgtttgatcagcctgactcaagcaatctgtgcaggtccggggagaagcagacctttggaaaagcaacactgaaataaaacaatcatgaattcacaaagaaaatgacgattacataaaccacctggagcatctggtctttctccccagataaacaaggtctgtccccaaactccaatcagtcaccatttgcctctcaactatttaccgtgcacctactatgagccaggcattgtgtgaggactggagattcaaactggatgagatctggattgtccagagggagatccgcatgaggagagcgggcaggagtggccatcagcaatcacaaagcaaggtaaacagtggcaaacgctacaagagcagaggggggcatcactgctgatgttgagagacaaggaaggtggctctcctcttggagatcgtggaaggcttcttgtaggagagggccttctcagtcactcactccgtcaccaaggcgatattgactaagtccccacaggcactctgctaggggctgtggatctgaggatgaacaaaacatggtccctgcaggctggaacttattgtctggtggagaagacagtcatctattaaacctagcaaaaagcacactaaaggacaaaaagagggctctacggtaaagtaaagtaaagcaaacaatcatgtcttgagggttcaggggaactccctaagaagagtagcactggggctgggatggggatgctgaggaggcactagagggatgaagctgatcagtggggtcacactgggaaccgatggcacaagccaatgggataatgtgggaggacctggtgagagcgctgtttacacagatgtgggaagagtcaaaagaaatcaaaatagtattggtatactataaaacatgctgctataaagacacatgcacacatatgtttattgtggcactattcacaatagcaaagacttggaaccaacccaaatgtccaacaatgatagattggattaagaaaatgtggcacatacaccatggaatactatgcagccgtaaaaaaggatgagttcatgtcctttgtagggacatggatgaagctggaaaccatcattctcagtaaactatcacaagaacaaaaaaccaaacaccgcgtgttcttactcataggtgggaattgaacaatgagaacacatggacaaaggaaggggaacatcacacaccggggcctgttgtggggtggggggaggggggagggatagcattaggagatatacctaatgttaaatgacaagttaatgggtgtagcacaccaacatggcacatgtatacctatgtaacaaacctgcatgttgtgcacatgtaccctaaaacttaaagtataataataaaaaaaaaagaaatcaagacgggatagtgttgtcccctggggtttgtaacaataaggagcccctcctatccctacaccgagaggagagagccttcgaagggaactgcagggagagtgggctgctcagctgggaccaagacacacaacctgcccaaggcggccagcaggggagaagctggggaagcaaaccctgaccacgctattttcccaccatttgatcgcctgccaaggcctgcctctggccaaacccaactggaagccagaaagcataggatcctcttgattaggctcacagagtcaacctcccaaggggcggagggaagtggacaagaatggaggggcccatggatgcatccagcccaagggaggagtatgcacagccacagcgaccagatgcaacaatctctgctcctccccaaaaccccgttaacatgactgggcagagaaggaagaaggagaaaggagcagctgagagagtacggcaaatgtgagacaggcgggacggtggtaactggcccaggaaataagagagagctgaagcctcagttgctgcagagggaagatcgatgacaagcaaatgttagctccgccgtgccccaggaagtttcaggaattagggacacccggtaacgttgagggtggtggctcagaccaaggctgaagaaaggcattggtgtctcccaggtctcgtccttcatccccagcagttaggggcctcgcttgccctccctgcaaggtagaagcaattgattagggaattggaccaggagagctcctgactcagggatacgggcatgtcagagggccagtgtgaggaacactgcatcctaaaggctaagttctccagctccatctgcttgcttgtttgccaaccaaacacatatctccaaacaggatactggattattcgtttctggtaaaataaaagacccatgagaaaacccctaccagatgctgaagttgaaagcccccagatggctgggcccctgctcctttattctatagtaaagcccctcccccaccgacaagcctagcccacctgcagagaggccaaccaaccttttagtgtctcgctcttaaatatgcttgggtcggtgagaatctctagatatttggggaaatttttcaatataagacaccaaaacagacatagatagaaaaaggacctctgctgaaatagaaccaatacaggaagcaaaaggaaaacttcaaagaccttataattaatatcctcagggagataaagatattgttcccatgaaacaagaacaagatcttataagacggaggtaatcagaaaataagagctcttagaaattaaaaatacaagaccgggtgcggtggctcacacatgtaaccccagcactttgggaggccgaggcaggcggatcacctgaggtcaggagttcaagaccagcctggccaacatggcgaaatcccgtctctactaaaaatacaaaagttagccgggcatggtggcgtgtgcttgtaatcccagctactcaggtggctgaggcaggagaattgcttgaacccaggaggcagaggttgcagtgagctgagatcgtgccactgcactccagcctgggcaacagaaggaaattctgtctcaaaaaaaataaaaagaaattaaatatacagtatcagtaatatgaaaatcagtagaaaggtttgaaaatgaagttgaataaacatcccaaaaacaggacaggaaaaaagatggtcaataagaaataaagaatataaaatttagaatatcaatctatgagagccaatatttagctgataggagtctcagagggaacagaaaaaaaaatcataagaaaaacgatcaaagaaattctagatgaaattttatccaaatcaaatgacaagtatttccagattgaatgggtttactgaggacccataccaaggaaactaaaaggcccaccaaagtatgttaccatgtgtattagctcattctcatgctgctgataaagacatacctgggactgcgtaatttataaagaaaaagaagtttaatggactcacagttctgcggggctggggaggtctcaggaaacttacagtcatggtggaaggggaagcaaacatgtccttcttcatatggtgacagctaggataagtgctgagcaaaagggggaaaagccccttataaaaccatcagatctcatgagaactcactaactatcacgagaacagcatgaggatcaccgcccccgtgattaaattacctcccacctggtccaactcatgacacgtgggaattacaggaactaaactcaagatgagatttgggtggggacacagccaaaccatatcaccatgaaatttcagaatatcaagaataaagattgtaaaaactcctaagaggaagaaaacagtcacatacaaagggtcaagaataataatgacttttgtatatgtcatgtgttgaattgtgttccctccaaattcatatgttgaagttttaaccccaatacctcagaaggaggccttatttggaaacagtctttgcagatgtaattggttaagatgaggtcacattggagcaggctgggcccctaatccaatacaactggtgtccttatatagaagagaaatcgatacacaggcatgcacacagggggatgctatgtgaagatgaaggtggagattggggtgatgcagcagaagccaaggaaaatcaaagagagcagcaaacccctagcagctaggagaaatgcacggaacagattctaccttacggtcctcagaaggaactgaccctgctgacatcttgatcttggaatcatagcctccagaactgtgagacaatacattgctagttttttttgttttgttttttttttttttttttttttggtggaggggaaacagttggatttttttgagacagggtctttccttctgtctcaggctggagtgcagtggagcaatcacctcaacttcctgggctcaagcagctctcccaactcagcctcccaagtagctgggactacaggcacacaccaccatgcccagctaatttttgtattttttgtagagacagggtctccctatgttgcccaggctggtctcaaactcctgggctcaagcaatctgcccacctcaacctcccaaagctctaggattacaggcatgagccgccacacccagccaaatttatgttgtttaaaccaaccagcttgtgatacttcgttacagcagccctagggaaggaatatattatgtgaacaaatgaagtgaccataaagagccacttcaaaattctgcaagtcatctctaatctagaattccataaccagccaaatatcagcaaagtgtgaaagcaaaataaagacattttcagacatgtagcatctcaaaaaataagaacaactcccatgcaccttttcttagaaagctactggaggatatactacatcaaacaaaggagtagatcaagaaagaggaagacttaggctccaggaaacaaggaatataacacataggaggcaaaaagatgtcccagaattgcaactgggaagtaaggctgaagaccaactagtccagactaaaacagtagactgtaaaagggccagaatcagaaggaaaaacattaaagacagacaataattatctaattattgaccatgtggaaaataatattgagaagaattttataatatcaaaggaatatctggaaaacatcactgactgatgcctagaaaagtcagcaatgcattgttggacagttatttattgagcaccttctagaggcctggcaccattctaagcaccgggaacacagcagtatataaagcagataaaaaatccctgccctcatgcagcatatgttctagagaaggaaatcagacaataatggaaataagtgaaatctatagcatattagatgatcattgtgctacagagaaaaataaagtgggaatggggatgccaggatgaggtttggggttcagctttagatagtcagggaaggcaccacagcaaaagtcctgaaaaaggagaaggaggaaaccatgcagatacctggggaagcaaatgcatagcaaatgcaaagtttctgcaaagggagcatacctagcaggtcaggaaacaccaaggaggcttctgtggctggagtggattgaaccagagaaggagatttgcattgcaatagaatagaagagtgacatgatctaacttatcttttaaaacagtcactccagcttctgtgttgaaatagactgtcaggtaacaatggtggaagtagagtgaccaattatgaggcagattgtaagcatctggatgggagccaatggtggcatgggctaaggcaccagcagtgagagagggtaagagacagattgtggctgtgttttgcaggtagaggtaacgagaatttgccaaaattggatgtggagtgtaagagcaagcagagaatcagaggaacttcaaagcacctcgtctgaacagttgcaggctggagtgactggtagctgggctagagaaagatacaggtgaatattgtggggtggtggggagcatagaggatgtgccttaggcatattaagaaagcttatcagacacatgtgatggttgatattaagtgtcaacttgactggattgaaggatgcctagatggctggtaaagtattgtttctgggtgtgtctttaagggtgttaccagagaagactgacatttgagtcagtgacctgggagaggaagacccaccctcaatgtgggtgggcaccatccaatcagctgccagtgcagctagcacaaggcaggtggaataagatgggataaacttgcttgctgagtcttctagctttcatctttctcctgtgcttgatgctttcttctgctcctcctgcccttggacatcagaccctagtttcttcagcctttggactctgggactgcaccagtggcttgccaggagctcttggtcctttggcctcagactgaaggctgcaccgccaacttccctggttttgaggcttttggacttggactgagtcactaccaccttctctcttccccaacttgcagatggcctattgtgcgactttgccttgtaatcgtgtaagccaattcttaatgaactgcctttcatatattgatagatcctatttggttccgtccctctggagaaccctaactaatacaacacccaagtgaagaatttgaggtcattgtgtacagaggtctggagcacaaggtaggggtgtgggcagatcatgaaagtggtcagtaagttcttggtattcaaagccatggagacaggatgagattgaacaaaataggaggaaaacaaaaacccaaacaattatgtgaaaagaagcctcatcatatcgtatcgctggcttgacagtgaacaacagttatagagtcataataattagaaacacaagatagtgacttaaccaaaattgtgatgtcactgtgctgggaagatggaaaagtgaagatggaaaataaagaaagagctgggaggtaagatctaagattgccaatgcctggtctttatactagaaaagaaacagatcgtgttggaaatctgtaactcaagactgagtagttaaagatacgcctggttcagagcaggctgaaaattgccctaaaagaaagcactgcaattccctttccctgtgcactgagcaccctcaacagccctgtccagacttgtgggtggccagatccctggaaggaaaggcgggagagctctagctggataaatggcacatttctggcaatgtgattgtgtgtatgcagtaattactcagcgattgcaacttccagcattactatttaggtaaatctgtgtcaagatgctgtctttgttcagtggcctaataccactgttggacacatagttgaataattaagttggaattcatgtttggatatatattaaagggtgttattcgtccatttttgcattgctataaagacatatctgagactgggtaatttataaagaaaagaggtttaatttggctcatggttctgcagactgtatgggaaccatggctggggaggcctcaggaaacttacagtcatgggagaaggcaaaggggaagcaggcaagtcttaaatggctggagcaggaggaggagggagtggggaaggtgctacacacttctaaacatccagatcttgtgagaactctattatgagaacaccagcaaagggatagtgctaaactcttcatgggggatccagccccatgatccagtcacctcccaccaggccccacctctaacaatggaaattatcattgaacatgagatttgggtggggacacagatccaagccatatcaaagggctacttttgttttaaacataccctttcttccattacatgctgattgccaggaagttcattcccgaaagaagtacaactttttttcctgtcattctgtgcttttctgtgctttttcaagactacgaacagttctacaagagaaaaataaacttcagaactgcctgaaacaaaatgttattatgaattggccactcaagaagaagtgatgatgtgaggtttcaggttttattaacttaaaccatttggtagacggattttcttttttttaatgaaacgcagacctgtgactcattgagcttcgcagggataatgatcaagagataactgaatttcttcttccactctgttttccagcttcacatatttctctaaatagatgtccatgttttatttcgtaattttgcttttcctttactcaaaaccaggatgggcatttcttccccaagtgaattttaacgcagctgctgcaggctgcagaataaaaccccgctggagaaagatgctccattaaagtaagattgaagccaaaattgaaaattgagagctaatttttgtgtaccttttgaatggatgcattttttaaattggcaatttgaaaaagaataaaattgttcagaatatacagtgcaatgggagaaagcagattgggcagaattcttgtaattctaattagatgcattcccctgtttgagatttacttacagagcaatcttagttttaatggaaagaaatgcttattgatgaatttgattgctactatggattcttacttgcctttcgtggctacaggatgaagcctcacaaaatgggaagttagggatccaggcgtagagtccgtcttccttgctaccaactggaactcttgtgcccagaatgcagtggaatttactaagaaatgctaaatagctgtttctctctctctctctctctctctctctctctctctctctgtctgtctctctccttctagagggaggatctttctttctttctacagacaggatctcgctctgtcacccaggctggagtgcagtggctatcatagctcattgcagtctaaaactcccaggcacaagcagccctccagcttcagcctcttgagtagctaagatgataagtgtgtgctacgatgcctggcatttttttaaatgtatttgtagagacagcatctcgctatgttgcccaggatggtcttgaactcccagcctgaagtaatgttactttaatttagatgtcctgggtagtccaaagataactgggaattaatttttcaccatattgagggactgcttggaattgcacctggaaggcaatgatgtcatcagcagatggcccgtggcttacctattgcaagggtacctgggtattctcatcctggaagtatggggtcctctatttgagatttaagtggctttgctgatctgattattggcaatgtgaataggaatatatggactgacatggaaagtatcagtcttgagtagcttgaaagtcaagaatctcatatgttaaggagtaaaacattttgtaggagaccactgaaaaatggaagggcaagaacaaagatacagatacaaggatgatgagagagaaaggcagagatgtcatgttaactgaagcatctgtttacatggcctatgaaggaagagaacccagataagagattctgggggatgaagctcaggccaaatccttggccttagtttgcccctgggtgttgctgacctctaaaaactgcagctgaaatggaaacaaatctgtccgagatgtttctgtccatctgaggtctgttcttttcgcctgagaccatcaccttgatatataccaccgtactgtattcgttttctatggctatcctaacaaatgtccacaaacttactggcttaaaacaacgcaaatgtattatcttacagttctggaactcagaatccctaaaggggtctcactgggctaagatcaagatgttggcagggctgcattcctttctggaagctctagggctgaattcttgtccttgttttttccagcctgaccacatttgttagccaagtccttcccatggtgccatctctctggttctcccttaacctattccccttttaaggaccgtcatgattatgttggatccacccaacatatattcctaccttaaggtcagctgattagaaaacttaattccaactgctaccttaattctcctttgccatgtaacctgccctacttgcag
